(19) United States
(12) Patent Application Publication
(10) Pub. No.: US 2021/0139584 A1
(43) Pub. Date: May 13, 2021

(54) DOSING REGIMEN FOR ANTI-BCMA AGENTS

(71) Applicants: AMGEN RESEARCH (MUNICH) GMBH, Munich (DE); AMGEN INC., Thousand Oaks, CA (US)

(72) Inventors: Alexander Minella, Thousand Oaks, CA (US); Vijay Vishesh Upreti, Thousand Oaks, CA (US); Julia Stieglmaier, Munich (DE); Birgit Huber, Munich (DE)

(21) Appl. No.: 16/869,793

(22) Filed: May 8, 2020

(30) Foreign Application Priority Data
Nov. 11, 2019 (EP) 19208417.6

(51) Int. Cl. C07K 16/28; A61K 9/00; A61P 35/00

(52) U.S. Cl. CPC C07K 16/2809; C07K 16/2878; A61K 2039/505; A61P 35/00; A61K 9/0019

(57) ABSTRACT

The present invention relates to the dosage and administration of anti-BCMA agents for the treatment of BCMA positive neoplasms. More specifically, the present invention relates to an antibody construct comprising a first domain which binds to BCMA, a second domain which binds to CD3 and a third domain which extends or enhances the half-life of the antibody construct, for use in the treatment or amelioration of a BCMA positive neoplasm, wherein the antibody construct is administered at a specified dose in at least one cycle. Moreover, the invention relates to a method for the treatment of a BCMA positive neoplasm comprising administering a specified dose of such antibody construct, and the use of such antibody construct for the manufacture of a medicament for the treatment of a BCMA positive neoplasm.

### FIELD OF THE INVENTION

[0001] The present invention relates to the dosage and administration of anti-BCMA agents for the treatment of BCMA positive neoplasms. More specifically, the present invention relates to an antibody construct comprising a first domain which binds to BCMA, a second domain which binds to CD3 and a third domain which extends or enhances the half-life of the antibody construct, for use in the treatment or amelioration of a BCMA positive neoplasm, wherein the antibody construct is administered at a specified dose in at least one cycle. Moreover, the invention relates to a method for the treatment of a BCMA positive neoplasm comprising administering a specified dose of such antibody construct, and the use of such antibody construct for the manufacture of a medicament for the treatment of a BCMA positive neoplasm.

### BACKGROUND OF THE INVENTION

[0002] Multiple Myeloma (MM) is a malignant tumor of plasma cells which proliferate in bone marrow and release para protein. The resulting clinical laboratory pictures include infection, bone destruction, bone marrow failure, renal failure and hypercalcemia. The age adjusted annual incidence is increasing with approximately 6 new cases per 100,000. The incidence is 2 times higher in the black US population than in Caucasians. The 5-year survival rate for MM has increased from ˜25% for newly diagnosed patients in 1975 to ˜45% in 2006. This improvement is mainly due to new drugs such as proteasome inhibitors and immunomodulators. However, MM is not considered curable with current approaches. Patients refractory to proteasome inhibitors and immunomodulators show an unfavorable outcome with a median overall survival of 9 months.

[0003] Outcome is particularly poor in high-risk populations such as the subgroup with del17p13 positive MM. Although many drugs are in clinical development for MM, new treatment options are still needed. Patients who show symptomatic disease are initially treated with primary induction therapy followed by high dose chemotherapy with autologous stem cell support in eligible patients. Patients eligible for intensive treatment are determined by age (65 to 75 years as upper limit), no comorbidities and intact renal function. Although this regimen has improved survival of younger and fit patients, the median duration of response does not exceed 3 years, and few patients remain free of the disease for more than 10 years.

[0004] Consolidation and maintenance approaches have been tested in order to increase the depth and duration of remission. Because maintenance treatment is challenging due to no efficacy or tolerability, there is still the option of improving survival outcome in the transplant setting by adding novel treatments to induction, consolidation or maintenance regimens. Patients not eligible for high dose therapy commonly receive induction regimens similar to the ones for the transplant candidates. These regimens include the proteasome inhibitor Bortezomib or a Melphalan based combination with Thalidomide. Median overall survival (OS) of Melphalan-Thalidomide-Prednisone (MPT) in elderly patients is 40 months. Lenalidomide in combination with Dexamethasone is the standard regimen for relapsed/refractory MM, but may move to the first line setting in transplant ineligible patients.

[0005] Other established regimens in the relapsed setting are repeat induction regimens or bortezomib or immunomodulator based salvage combinations with alkylating agents. An improvement of outcome (progression-free survival (PFS) and OS) is needed for patients in relapsed disease. Patients which are refractory to established treatments and progressing on treatment have a dismal outcome of 9 months OS on treatment and 3 months without treatment. The unmet need is highest in these patients.

[0006] Bispecific molecules such as BiTE® (bispecific T cell engager) antibody constructs are recombinant protein constructs having (at least) one binding domain that is specific for a selected tumor-associated surface antigen on target cells, and a second binding domain that is specific for CD3, a subunit of the T cell receptor complex on T cells. By their particular design, BiTE® antibody constructs are uniquely suited to transiently connect T cells with target cells and, at the same time, potently activate the inherent cytolytic potential of T cells against target cells. The first generation of so-called “canonical” (non-half-life-extended) BiTE® antibody constructs (see WO 99/54440 and WO 2005/040220) was brought into the clinic as AMG 103 (blinatumomab, anti-CD19×anti-CD3) and AMG 110 (solitomab, anti-EpCAM×anti-CD3). A further development of the first generation of canonical BiTE® antibody constructs was the provision of bispecific antibody constructs binding to a context independent epitope at the N-terminus of the CD3-epsilon chain of human and Callithrix jacchus, Saguinus oedipus or Saimiri sciureus (WO 2008/119567). The first BiTE® molecule comprising this new CD3-epsilon binding domain that was tested in the clinic was AMG 330.

[0007] Antibody constructs as described in WO 2008/119567 are likely to suffer from rapid clearance from the body; thus, whilst they are able to reach most parts of the body rapidly, and are quick to produce and easy to handle, their in vivo applications may be limited by their brief persistence in vivo. Prolonged administration by continuous intravenous infusion was used to achieve therapeutic effects because of the short in vivo half-life of this relatively small molecule. However, such continuous intravenous infusions are classified as inconvenient for the patients and, thus, in case of more convenient alternative treatment approaches, might hamper the election of the compound demonstrated to be more efficient in the treatment of the respective disease. This led to the development of bispecific therapeutics that retain similar therapeutic efficacy and at the same time have favorable pharmacokinetic properties, including a longer half-life. Therefore, an important further development of the so-called canonical BiTE® molecules was the addition of a further domain that extends or enhances the half-life of the antibody construct. The resulting molecules are also called “HLE” (half-life extended) BiTE® molecules, see e.g. WO 2017/134140.

[0008] B cell maturation antigen (BCMA, TNFRSF17, CD269) is a transmembrane protein belonging to the TNF receptor super family. BCMA expression is selectively induced during late stage plasma cell differentiation and is absent on naïve and memory B cells. Upon BCMA binding to its ligands, B cell activating factor (BAFF) and a proliferation inducing ligand (APRIL), the survival of the bone marrow plasma cells and plasmablasts is promoted. BCMA does not maintain normal B cell homeostasis, but is required for the survival of long lived plasma cells. Studies in BCMA −/− mice showed that the survival of long lived bone marrow plasma cells was impaired, but B cell development and early humoral immune responses were indistinguishable from wild type mice. The mRNA expression of BCMA is highly elevated in malignant plasma cell disorders. By contrast, mRNA expression in normal tissues is very low and restricted to lymphoid tissues where normal long-lived plasma cells are located. BCMA protein expression is reported to be restricted to plasma cells only. Expression of BCMA is confined to plasma blasts and long-lived plasma cells and cannot be detected on other normal human tissues. BCMA is universally expressed on the cell surface of MM cells and at relatively higher levels on malignant plasma cells than the level observed on normal plasma cells. There is no correlation between BCMA expression and MM disease stage, response to last treatment and time from diagnosis. Neither T cells nor myeloid cells or CD34+ hematopoietic stem cells express BCMA. The selective expression of BCMA makes it a very attractive target for antibody-based and chimeric antigen receptor (CAR)-based therapies.

[0009] AMG 420 (formerly BI 836909) is a canonical bispecific T cell engager which binds to BCMA on target cells as well as to CD3-epsilon on T cells. It functions as a bridge between BCMA positive target cells such as MM cells and cytotoxic T lymphocytes (CTLs) by directing the cytolytic activity of CTLs to the target cells. AMG 420 consists of two single chain variable fragments (scFv), one being directed to BCMA and the other one to CD3. Each of the scFv fragments consists of a VH and a VL domain connected with a glycine/serine linker. The two scFv fragments are also connected with a glycine/serine linker. Half-life extended anti-BCMA×anti-CD3 antibody constructs such as AMG 701 are described in detail in WO 2017/134134. There is an ongoing unmet medical need for the development of therapies for the treatment of BCMA positive neoplasms, in particular with such half-life extended anti-BCMA×anti-CD3 molecules.

### SUMMARY OF THE INVENTION

[0010] Based on the disclosure provided herein, those skilled in the art will recognize, or be able to ascertain using no more than routine experimentation, many equivalents to the specific embodiments of the invention described herein. Such equivalents are intended to be encompassed by the following items.

Item 1 An antibody construct comprising a first domain which binds to BCMA, a second domain which binds to CD3 and a third domain which extends the half-life of the antibody construct, for use in the treatment or amelioration of a BCMA positive neoplasm, wherein the antibody construct is administered at a minimum dose of 800 μg/day in at least one cycle, wherein one cycle comprises at least three individual administrations of the antibody construct.
Item 2. The antibody construct according to item 1 which is administered for 2, 3, 4, 5, 6, 7, 8, 9, 10, 11, 12, 13, 14, 15, 16, 17, 18, 19, 20, 21, 22, 23, 24, 25 or more cycles.
Item 3. The antibody construct according to any one of items 1 or 2, wherein one cycle has about 25 to about 30 days, preferably about 26 or 27 to about 29 days, and more preferably about 28 days.
Item 4. The antibody construct according to any one of the preceding items, wherein the antibody construct is administered at a dose of 800 μg/day to 12 mg per day, such as 1000 μg, 1200 μg, 1500 μg, 1600 μg, 2000 μg, 2500 μg, 3000 μg, 3500 μg, 4000 μg, 4500 μg, 5000 μg, 5500 μg, 6000 μg, 6500 μg, 7000 μg, 7500 μg, 8000 μg, 8500 μg, 9000 μg, 9500 μg, 10 mg, 11 mg or 12 mg per day.
Item 5. The antibody construct according to any one of the preceding items, wherein the antibody construct is administered in one or two dose steps during the first cycle.
Item 6. The antibody construct according to item 5, wherein a first dose is between 800 μg/day and 1200 μg/day, an optional second dose is between 2500 μg/day and 5000 μg/day, preferably about 3000 μg/day or about 4500 μg/day, and a last dose (target dose) is between 6500 μg/day and 12 mg/day, such as 6500 μg/day, 7000 μg/day, 7500 μg/day, 8000 μg/day, 8500 μg/day, 9000 μg/day, 9500 μg/day, 10 mg/day, 11 mg/day or 12 mg/day.
Item 7. The antibody construct according to any one of the preceding items, wherein the first cycle comprises or consists of three to six individual administrations, preferably four or five individual administrations of the antibody construct.
Item 7a. The antibody construct according to item 6 or 7, wherein the first dose of 800 μg/day is administered on day 1.
Item 7b. The antibody construct according to item 7a, wherein:
[0011] a) the target dose is administered on day 8 (+/− one or two days), day 15 (+/− one or two days) and day 22 (+/− one or two days), wherein the target dose is between 3000 μg/day and 12 mg/day, such as 3000 μg, 3500 μg, 4000 μg, 4500 μg, 5000 μg, 5500 μg, 6000 μg, 6500 μg, 7000 μg, 7500 μg, 8000 μg, 8500 μg, 9000 μg, 9500 μg, 10 mg, 11 mg or 12 mg per day;
[0012] b) the target dose is administered on day 4 or day 5 (+/− one or two days), day 12 (+/− one or two days) and day 19 (+/− one or two days), wherein the target dose is defined as in a);
[0013] c) the target dose is administered on day 3 or day 4 (+/− one or two days), day 8 (+/− one or two days), day 15 (+/− one or two days) and day 22 (+/− one or two days), wherein the target dose is defined as in a); or
[0014] d) the second dose is administered on day 3 or day 4 (+/− one or two days), and the target dose is administered on day 8 (+/− one or two days), day 15 (+/− one or two days) and day 22 (+/− one or two days), wherein the second dose is between 2500 μg/day and 5000 μg/day, preferably about 3000 μg/day or about 4500 μg/day, and the target dose is higher than the second dose and is defined as in a).
   Item 8. The antibody construct according to any one of the items 2 to 7, wherein the antibody construct is administered during the second cycle and optionally during any subsequent cycle at constant doses.
   Item 8a. The antibody construct according to item 8, wherein the constant dose is the highest dose administered during the first cycle (target dose).
   Item 8b. The antibody construct according to any one of the items 2 to 8a, wherein the antibody construct is administered once by week during the second cycle and optionally during any subsequent cycle.
   Item 9. The antibody construct according to any one of the preceding items, which is administered parenterally, preferably intravenously, and more preferably via intravenous bolus injection, bolus infusion or short-term intravenous infusion.
   Item 10. The antibody construct according to any one of the preceding items, wherein the BCMA positive neoplasm is selected from the group consisting of multiple myeloma, relapsed and/or refractory multiple myeloma, heavy chain multiple myeloma, light chain multiple myeloma, extramedullary myeloma, plasmacytoma, plasma cell leukemia, Waldenström's macroglobulinemia, and smoldering myeloma.
   Item 10a. The antibody construct according to item 10, wherein the BCMA positive neoplasm is multiple myeloma.
   Item 10b. The antibody construct according to item 10a, wherein the multiple myeloma is selected from the group consisting of relapsed and/or refractory multiple myeloma, heavy chain multiple myeloma, light chain multiple myeloma, extramedullary multiple myeloma, and smoldering multiple myeloma.
   Item 11. The antibody construct according to any one of the preceding items, wherein
[0015] a) the antibody construct is a single chain polypeptide,
[0016] b) the first domain is in the format of an scFv,
[0017] c) the second domain is in the format of an scFv, and/or
[0018] d) the first domain and the second domain are connected via a linker, preferably a peptide linker, more preferably a glycine/serine linker.
   Item 12. The antibody construct according to any one of the preceding items, which competes for binding to BCMA with or which binds to the same epitope of BCMA as:
[0019] a) an antibody or antibody construct comprising a domain which binds to BCMA on the surface of a target cell, wherein said domain comprises a VH region comprising CDR-H1 as depicted in SEQ ID NO: 171, CDR-H2 as depicted in SEQ ID NO: 172, and CDR-H3 as depicted in SEQ ID NO: 173, and a VL region comprising CDR-L1 as depicted in SEQ ID NO: 174, CDR-L2 as depicted in SEQ ID NO: 175, and CDR-L3 as depicted in SEQ ID NO: 176;
[0020] b) an antibody or antibody construct comprising a domain which binds to BCMA on the surface of a target cell, wherein said domain comprises a VH region as depicted in SEQ ID NO: 177, and a VL region as depicted in SEQ ID NO: 178;
[0021] c) an antibody construct comprising a domain which binds to BCMA on the surface of a target cell, wherein said domain comprises the amino acid sequence as depicted in SEQ ID NO: 179; or
[0022] d) an antibody construct having the amino acid sequence as depicted in SEQ ID NO: 661.
   Item 13. The antibody construct according to any one of the preceding items, which competes for binding to CD3 with or which binds to the same epitope of CD3 as:
[0023] a) an antibody or antibody construct comprising a domain which binds to CD3 on the surface of a T cell, wherein said domain comprises a VH region comprising CDR-H1 as depicted in SEQ ID NO: 636, CDR-H2 as depicted in SEQ ID NO: 637, and CDR-H3 as depicted in SEQ ID NO: 638, and a VL region comprising CDR-L1 as depicted in SEQ ID NO: 633, CDR-L2 as depicted in SEQ ID NO: 634, CDR-L3 as depicted in SEQ ID NO: 635;
[0024] b) an antibody or antibody construct comprising a domain which binds to CD3 on the surface of a T cell, wherein said domain comprises a VH region as depicted in SEQ ID NO: 639, and a VL region as depicted in SEQ ID NO: 641;
[0025] c) an antibody construct comprising a domain which binds to CD3 on the surface of a T cell, wherein said domain comprises the amino acid sequence as depicted in SEQ ID NO: 642; or
[0026] d) an antibody construct having the amino acid sequence as depicted in SEQ ID NO: 661.
   Item 14. The antibody construct according to any one of the preceding items, wherein the first domain which binds to BCMA comprises a VH region comprising CDR-H1, CDR-H2 and CDR-H3 and a VL region comprising CDR-L1, CDR-L2 and CDR-L3 selected from:
[0027] (1) CDR-H1 as depicted in SEQ ID NO: 1, CDR-H2 as depicted in SEQ ID NO: 2, CDR-H3 as depicted in SEQ ID NO: 3, CDR-L1 as depicted in SEQ ID NO: 4, CDR-L2 as depicted in SEQ ID NO: 5, and CDR-L3 as depicted in SEQ ID NO: 6;
[0028] (2) CDR-H1 as depicted in SEQ ID NO: 11, CDR-H2 as depicted in SEQ ID NO: 12, CDR-H3 as depicted in SEQ ID NO: 13, CDR-L1 as depicted in SEQ ID NO: 14, CDR-L2 as depicted in SEQ ID NO: 15, and CDR-L3 as depicted in SEQ ID NO: 16;
[0029] (3) CDR-H1 as depicted in SEQ ID NO: 21, CDR-H2 as depicted in SEQ ID NO: 22, CDR-H3 as depicted in SEQ ID NO: 23, CDR-L1 as depicted in SEQ ID NO: 24, CDR-L2 as depicted in SEQ ID NO: 25, and CDR-L3 as depicted in SEQ ID NO: 26;
[0030] (4) CDR-H1 as depicted in SEQ ID NO: 31, CDR-H2 as depicted in SEQ ID NO: 32, CDR-H3 as depicted in SEQ ID NO: 33, CDR-L1 as depicted in SEQ ID NO: 34, CDR-L2 as depicted in SEQ ID NO: 35, and CDR-L3 as depicted in SEQ ID NO: 36;
[0031] (5) CDR-H1 as depicted in SEQ ID NO: 41, CDR-H2 as depicted in SEQ ID NO: 42, CDR-H3 as depicted in SEQ ID NO: 43, CDR-L1 as depicted in SEQ ID NO: 44, CDR-L2 as depicted in SEQ ID NO: 45, and CDR-L3 as depicted in SEQ ID NO: 46;
[0032] (6) CDR-H1 as depicted in SEQ ID NO: 51, CDR-H2 as depicted in SEQ ID NO: 52, CDR-H3 as depicted in SEQ ID NO: 53, CDR-L1 as depicted in SEQ ID NO: 54, CDR-L2 as depicted in SEQ ID NO: 55, and CDR-L3 as depicted in SEQ ID NO: 56;
[0033] (7) CDR-H1 as depicted in SEQ ID NO: 61, CDR-H2 as depicted in SEQ ID NO: 62, CDR-H3 as depicted in SEQ ID NO: 63, CDR-L1 as depicted in SEQ ID NO: 64, CDR-L2 as depicted in SEQ ID NO: 65, and CDR-L3 as depicted in SEQ ID NO: 66;
[0034] (8) CDR-H1 as depicted in SEQ ID NO: 71, CDR-H2 as depicted in SEQ ID NO: 72, CDR-H3 as depicted in SEQ ID NO: 73, CDR-L1 as depicted in SEQ ID NO: 74, CDR-L2 as depicted in SEQ ID NO: 75, and CDR-L3 as depicted in SEQ ID NO: 76;
[0035] (9) CDR-H1 as depicted in SEQ ID NO: 81, CDR-H2 as depicted in SEQ ID NO: 82, CDR-H3 as depicted in SEQ ID NO: 83, CDR-L1 as depicted in SEQ ID NO: 84, CDR-L2 as depicted in SEQ ID NO: 85, and CDR-L3 as depicted in SEQ ID NO: 86;
[0036] (10) CDR-H1 as depicted in SEQ ID NO: 91, CDR-H2 as depicted in SEQ ID NO: 92, CDR-H3 as depicted in SEQ ID NO: 93, CDR-L1 as depicted in SEQ ID NO: 94, CDR-L2 as depicted in SEQ ID NO: 95, and CDR-L3 as depicted in SEQ ID NO: 96;
[0037] (11) CDR-H1 as depicted in SEQ ID NO: 101, CDR-H2 as depicted in SEQ ID NO: 102, CDR-H3 as depicted in SEQ ID NO: 103, CDR-L1 as depicted in SEQ ID NO: 104, CDR-L2 as depicted in SEQ ID NO: 105, and CDR-L3 as depicted in SEQ ID NO: 106;
[0038] (12) CDR-H1 as depicted in SEQ ID NO: 111, CDR-H2 as depicted in SEQ ID NO: 112, CDR-H3 as depicted in SEQ ID NO: 113, CDR-L1 as depicted in SEQ ID NO: 114, CDR-L2 as depicted in SEQ ID NO: 115, and CDR-L3 as depicted in SEQ ID NO: 116;
[0039] (13) CDR-H1 as depicted in SEQ ID NO: 121, CDR-H2 as depicted in SEQ ID NO: 122, CDR-H3 as depicted in SEQ ID NO: 123, CDR-L1 as depicted in SEQ ID NO: 124, CDR-L2 as depicted in SEQ ID NO: 125, and CDR-L3 as depicted in SEQ ID NO: 126;
[0040] (14) CDR-H1 as depicted in SEQ ID NO: 131, CDR-H2 as depicted in SEQ ID NO: 132, CDR-H3 as depicted in SEQ ID NO: 133, CDR-L1 as depicted in SEQ ID NO: 134, CDR-L2 as depicted in SEQ ID NO: 135, and CDR-L3 as depicted in SEQ ID NO: 136;
[0041] (15) CDR-H1 as depicted in SEQ ID NO: 141, CDR-H2 as depicted in SEQ ID NO: 142, CDR-H3 as depicted in SEQ ID NO: 143, CDR-L1 as depicted in SEQ ID NO: 144, CDR-L2 as depicted in SEQ ID NO: 145, and CDR-L3 as depicted in SEQ ID NO: 146;
[0042] (16) CDR-H1 as depicted in SEQ ID NO: 151, CDR-H2 as depicted in SEQ ID NO: 152, CDR-H3 as depicted in SEQ ID NO: 153, CDR-L1 as depicted in SEQ ID NO: 154, CDR-L2 as depicted in SEQ ID NO: 155, and CDR-L3 as depicted in SEQ ID NO: 156;
[0043] (17) CDR-H1 as depicted in SEQ ID NO: 161, CDR-H2 as depicted in SEQ ID NO: 162, CDR-H3 as depicted in SEQ ID NO: 163, CDR-L1 as depicted in SEQ ID NO: 164, CDR-L2 as depicted in SEQ ID NO: 165, and CDR-L3 as depicted in SEQ ID NO: 166;
[0044] (18) CDR-H1 as depicted in SEQ ID NO: 171, CDR-H2 as depicted in SEQ ID NO: 172, CDR-H3 as depicted in SEQ ID NO: 173, CDR-L1 as depicted in SEQ ID NO: 174, CDR-L2 as depicted in SEQ ID NO: 175, and CDR-L3 as depicted in SEQ ID NO: 176;
[0045] (19) CDR-H1 as depicted in SEQ ID NO: 181, CDR-H2 as depicted in SEQ ID NO: 182, CDR-H3 as depicted in SEQ ID NO: 183, CDR-L1 as depicted in SEQ ID NO: 184, CDR-L2 as depicted in SEQ ID NO: 185, and CDR-L3 as depicted in SEQ ID NO: 186;
[0046] (20) CDR-H1 as depicted in SEQ ID NO: 191, CDR-H2 as depicted in SEQ ID NO: 192, CDR-H3 as depicted in SEQ ID NO: 193, CDR-L1 as depicted in SEQ ID NO: 194, CDR-L2 as depicted in SEQ ID NO: 195, and CDR-L3 as depicted in SEQ ID NO: 196;
[0047] (21) CDR-H1 as depicted in SEQ ID NO: 201, CDR-H2 as depicted in SEQ ID NO: 202, CDR-H3 as depicted in SEQ ID NO: 203, CDR-L1 as depicted in SEQ ID NO: 204, CDR-L2 as depicted in SEQ ID NO: 205, and CDR-L3 as depicted in SEQ ID NO: 206;
[0048] (22) CDR-H1 as depicted in SEQ ID NO: 211, CDR-H2 as depicted in SEQ ID NO: 212, CDR-H3 as depicted in SEQ ID NO: 213, CDR-L1 as depicted in SEQ ID NO: 214, CDR-L2 as depicted in SEQ ID NO: 215, and CDR-L3 as depicted in SEQ ID NO: 216;
[0049] (23) CDR-H1 as depicted in SEQ ID NO: 221, CDR-H2 as depicted in SEQ ID NO: 222, CDR-H3 as depicted in SEQ ID NO: 223, CDR-L1 as depicted in SEQ ID NO: 224, CDR-L2 as depicted in SEQ ID NO: 225, and CDR-L3 as depicted in SEQ ID NO: 226;
[0050] (24) CDR-H1 as depicted in SEQ ID NO: 231, CDR-H2 as depicted in SEQ ID NO: 232, CDR-H3 as depicted in SEQ ID NO: 233, CDR-L1 as depicted in SEQ ID NO: 234, CDR-L2 as depicted in SEQ ID NO: 235, and CDR-L3 as depicted in SEQ ID NO: 236;
[0051] (25) CDR-H1 as depicted in SEQ ID NO: 241, CDR-H2 as depicted in SEQ ID NO: 242, CDR-H3 as depicted in SEQ ID NO: 243, CDR-L1 as depicted in SEQ ID NO: 244, CDR-L2 as depicted in SEQ ID NO: 245, and CDR-L3 as depicted in SEQ ID NO: 246;
[0052] (26) CDR-H1 as depicted in SEQ ID NO: 251, CDR-H2 as depicted in SEQ ID NO: 252, CDR-H3 as depicted in SEQ ID NO: 253, CDR-L1 as depicted in SEQ ID NO: 254, CDR-L2 as depicted in SEQ ID NO: 255, and CDR-L3 as depicted in SEQ ID NO: 256;
[0053] (27) CDR-H1 as depicted in SEQ ID NO: 261, CDR-H2 as depicted in SEQ ID NO: 262, CDR-H3 as depicted in SEQ ID NO: 263, CDR-L1 as depicted in SEQ ID NO: 264, CDR-L2 as depicted in SEQ ID NO: 265, and CDR-L3 as depicted in SEQ ID NO: 266;
[0054] (28) CDR-H1 as depicted in SEQ ID NO: 271, CDR-H2 as depicted in SEQ ID NO: 272, CDR-H3 as depicted in SEQ ID NO: 273, CDR-L1 as depicted in SEQ ID NO: 274, CDR-L2 as depicted in SEQ ID NO: 275, and CDR-L3 as depicted in SEQ ID NO: 276;
[0055] (29) CDR-H1 as depicted in SEQ ID NO: 281, CDR-H2 as depicted in SEQ ID NO: 282, CDR-H3 as depicted in SEQ ID NO: 283, CDR-L1 as depicted in SEQ ID NO: 284, CDR-L2 as depicted in SEQ ID NO: 285, and CDR-L3 as depicted in SEQ ID NO: 286;
[0056] (30) CDR-H1 as depicted in SEQ ID NO: 291, CDR-H2 as depicted in SEQ ID NO: 292, CDR-H3 as depicted in SEQ ID NO: 293, CDR-L1 as depicted in SEQ ID NO: 294, CDR-L2 as depicted in SEQ ID NO: 295, and CDR-L3 as depicted in SEQ ID NO: 296;
[0057] (31) CDR-H1 as depicted in SEQ ID NO: 301, CDR-H2 as depicted in SEQ ID NO: 302, CDR-H3 as depicted in SEQ ID NO: 303, CDR-L1 as depicted in SEQ ID NO: 304, CDR-L2 as depicted in SEQ ID NO: 305, and CDR-L3 as depicted in SEQ ID NO: 306;
[0058] (32) CDR-H1 as depicted in SEQ ID NO: 311, CDR-H2 as depicted in SEQ ID NO: 312, CDR-H3 as depicted in SEQ ID NO: 313, CDR-L1 as depicted in SEQ ID NO: 314, CDR-L2 as depicted in SEQ ID NO: 315, and CDR-L3 as depicted in SEQ ID NO: 316;
[0059] (33) CDR-H1 as depicted in SEQ ID NO: 321, CDR-H2 as depicted in SEQ ID NO: 322, CDR-H3 as depicted in SEQ ID NO: 323, CDR-L1 as depicted in SEQ ID NO: 324, CDR-L2 as depicted in SEQ ID NO: 325, and CDR-L3 as depicted in SEQ ID NO: 326;
[0060] (34) CDR-H1 as depicted in SEQ ID NO: 331, CDR-H2 as depicted in SEQ ID NO: 332, CDR-H3 as depicted in SEQ ID NO: 333, CDR-L1 as depicted in SEQ ID NO: 334, CDR-L2 as depicted in SEQ ID NO: 335, and CDR-L3 as depicted in SEQ ID NO: 336;
[0061] (35) CDR-H1 as depicted in SEQ ID NO: 341, CDR-H2 as depicted in SEQ ID NO: 342, CDR-H3 as depicted in SEQ ID NO: 343, CDR-L1 as depicted in SEQ ID NO: 344, CDR-L2 as depicted in SEQ ID NO: 345, and CDR-L3 as depicted in SEQ ID NO: 346;
[0062] (36) CDR-H1 as depicted in SEQ ID NO: 351, CDR-H2 as depicted in SEQ ID NO: 352, CDR-H3 as depicted in SEQ ID NO: 353, CDR-L1 as depicted in SEQ ID NO: 354, CDR-L2 as depicted in SEQ ID NO: 355, and CDR-L3 as depicted in SEQ ID NO: 356;
[0063] (37) CDR-H1 as depicted in SEQ ID NO: 361, CDR-H2 as depicted in SEQ ID NO: 362, CDR-H3 as depicted in SEQ ID NO: 363, CDR-L1 as depicted in SEQ ID NO: 364, CDR-L2 as depicted in SEQ ID NO: 365, and CDR-L3 as depicted in SEQ ID NO: 366;
[0064] (38) CDR-H1 as depicted in SEQ ID NO: 371, CDR-H2 as depicted in SEQ ID NO: 372, CDR-H3 as depicted in SEQ ID NO: 373, CDR-L1 as depicted in SEQ ID NO: 374, CDR-L2 as depicted in SEQ ID NO: 375, and CDR-L3 as depicted in SEQ ID NO: 376;
[0065] (39) CDR-H1 as depicted in SEQ ID NO: 381, CDR-H2 as depicted in SEQ ID NO: 382, CDR-H3 as depicted in SEQ ID NO: 383, CDR-L1 as depicted in SEQ ID NO: 384, CDR-L2 as depicted in SEQ ID NO: 385, and CDR-L3 as depicted in SEQ ID NO: 386;
[0066] (40) CDR-H1 as depicted in SEQ ID NO: 391, CDR-H2 as depicted in SEQ ID NO: 392, CDR-H3 as depicted in SEQ ID NO: 393, CDR-L1 as depicted in SEQ ID NO: 394, CDR-L2 as depicted in SEQ ID NO: 395, and CDR-L3 as depicted in SEQ ID NO: 396;
[0067] (41) CDR-H1 as depicted in SEQ ID NO: 401, CDR-H2 as depicted in SEQ ID NO: 402, CDR-H3 as depicted in SEQ ID NO: 403, CDR-L1 as depicted in SEQ ID NO: 404, CDR-L2 as depicted in SEQ ID NO: 405, and CDR-L3 as depicted in SEQ ID NO: 406;
[0068] (42) CDR-H1 as depicted in SEQ ID NO: 411, CDR-H2 as depicted in SEQ ID NO: 412, CDR-H3 as depicted in SEQ ID NO: 413, CDR-L1 as depicted in SEQ ID NO: 414, CDR-L2 as depicted in SEQ ID NO: 415, and CDR-L3 as depicted in SEQ ID NO: 416;
[0069] (43) CDR-H1 as depicted in SEQ ID NO: 421, CDR-H2 as depicted in SEQ ID NO: 422, CDR-H3 as depicted in SEQ ID NO: 423, CDR-L1 as depicted in SEQ ID NO: 424, CDR-L2 as depicted in SEQ ID NO: 425, and CDR-L3 as depicted in SEQ ID NO: 426;
[0070] (44) CDR-H1 as depicted in SEQ ID NO: 431, CDR-H2 as depicted in SEQ ID NO: 432, CDR-H3 as depicted in SEQ ID NO: 433, CDR-L1 as depicted in SEQ ID NO: 434, CDR-L2 as depicted in SEQ ID NO: 435, and CDR-L3 as depicted in SEQ ID NO: 436;
[0071] (45) CDR-H1 as depicted in SEQ ID NO: 441, CDR-H2 as depicted in SEQ ID NO: 442, CDR-H3 as depicted in SEQ ID NO: 443, CDR-L1 as depicted in SEQ ID NO: 444, CDR-L2 as depicted in SEQ ID NO: 445, and CDR-L3 as depicted in SEQ ID NO: 446;
[0072] (46) CDR-H1 as depicted in SEQ ID NO: 451, CDR-H2 as depicted in SEQ ID NO: 452, CDR-H3 as depicted in SEQ ID NO: 453, CDR-L1 as depicted in SEQ ID NO: 454, CDR-L2 as depicted in SEQ ID NO: 455, and CDR-L3 as depicted in SEQ ID NO: 456;
[0073] (47) CDR-H1 as depicted in SEQ ID NO: 461, CDR-H2 as depicted in SEQ ID NO: 462, CDR-H3 as depicted in SEQ ID NO: 463, CDR-L1 as depicted in SEQ ID NO: 464, CDR-L2 as depicted in SEQ ID NO: 465, and CDR-L3 as depicted in SEQ ID NO: 466;
[0074] (48) CDR-H1 as depicted in SEQ ID NO: 471, CDR-H2 as depicted in SEQ ID NO: 472, CDR-H3 as depicted in SEQ ID NO: 473, CDR-L1 as depicted in SEQ ID NO: 474, CDR-L2 as depicted in SEQ ID NO: 475, and CDR-L3 as depicted in SEQ ID NO: 476;
[0075] (49) CDR-H1 as depicted in SEQ ID NO: 481, CDR-H2 as depicted in SEQ ID NO: 482, CDR-H3 as depicted in SEQ ID NO: 483, CDR-L1 as depicted in SEQ ID NO: 484, CDR-L2 as depicted in SEQ ID NO: 485, and CDR-L3 as depicted in SEQ ID NO: 486;
[0076] (50) CDR-H1 as depicted in SEQ ID NO: 491, CDR-H2 as depicted in SEQ ID NO: 492, CDR-H3 as depicted in SEQ ID NO: 493, CDR-L1 as depicted in SEQ ID NO: 494, CDR-L2 as depicted in SEQ ID NO: 495, and CDR-L3 as depicted in SEQ ID NO: 496;
[0077] (51) CDR-H1 as depicted in SEQ ID NO: 501, CDR-H2 as depicted in SEQ ID NO: 502, CDR-H3 as depicted in SEQ ID NO: 503, CDR-L1 as depicted in SEQ ID NO: 504, CDR-L2 as depicted in SEQ ID NO: 505, and CDR-L3 as depicted in SEQ ID NO: 506;
[0078] (52) CDR-H1 as depicted in SEQ ID NO: 511, CDR-H2 as depicted in SEQ ID NO: 512, CDR-H3 as depicted in SEQ ID NO: 513, CDR-L1 as depicted in SEQ ID NO: 514, CDR-L2 as depicted in SEQ ID NO: 515, and CDR-L3 as depicted in SEQ ID NO: 516; and
[0079] (53) CDR-H1 as depicted in SEQ ID NO: 521, CDR-H2 as depicted in SEQ ID NO: 522, CDR-H3 as depicted in SEQ ID NO: 523, CDR-L1 as depicted in SEQ ID NO: 524, CDR-L2 as depicted in SEQ ID NO: 525, and CDR-L3 as depicted in SEQ ID NO: 526.
   Item 15. The antibody construct according to any one of the preceding items, wherein the first domain which binds to BCMA comprises a VH region having an amino acid sequence selected from the group consisting of those depicted in SEQ ID NOs: 7, 17, 27, 37, 47, 57, 67, 77, 87, 97, 107, 117, 127, 137, 147, 157, 167, 177, 187, 197, 207, 217, 227, 237, 247, 257, 267, 277, 287, 307, 317, 327, 337, 347, 357, 367, 377, 387, 397, 407, 417, 427, 437, 447, 457, 467, 477, 487, 497, 507, 517, and 527, preferably SEQ ID NO: 177.
   Item 16. The antibody construct according to any one of the preceding items, wherein the first domain which binds to BCMA comprises a VL region having an amino acid sequence selected from the group consisting of those depicted in SEQ ID NOs: 8, 18, 28, 38, 48, 58, 68, 78, 88, 98, 108, 118, 128, 138, 148, 158, 168, 178, 188, 198, 208, 218, 228, 238, 248, 258, 268, 278, 288, 298, 308, 318, 328, 338, 348, 358, 368, 378, 388, 398, 408, 418, 428, 438, 448, 458, 468, 478, 488, 498, 508, 518, and 528, preferably SEQ ID NO: 178.
   Item 17. The antibody construct according to any one of the preceding items, wherein the first domain which binds to BCMA comprises a VH region and a VL region selected from the group consisting of:
[0080] (1) a VH region as depicted in SEQ ID NO: 7 and a VL region as depicted in SEQ ID NO: 8;
[0081] (2) a VH region as depicted in SEQ ID NO: 17 and a VL region as depicted in SEQ ID NO: 18;
[0082] (3) a VH region as depicted in SEQ ID NO: 27 and a VL region as depicted in SEQ ID NO: 28;
[0083] (4) a VH region as depicted in SEQ ID NO: 37 and a VL region as depicted in SEQ ID NO: 38;
[0084] (5) a VH region as depicted in SEQ ID NO: 47 and a VL region as depicted in SEQ ID NO: 48;
[0085] (6) a VH region as depicted in SEQ ID NO: 57 and a VL region as depicted in SEQ ID NO: 58;
[0086] (7) a VH region as depicted in SEQ ID NO: 67 and a VL region as depicted in SEQ ID NO: 68;
[0087] (8) a VH region as depicted in SEQ ID NO: 77 and a VL region as depicted in SEQ ID NO: 78;
[0088] (9) a VH region as depicted in SEQ ID NO: 87 and a VL region as depicted in SEQ ID NO: 88;
[0089] (10) a VH region as depicted in SEQ ID NO: 97 and a VL region as depicted in SEQ ID NO: 98;
[0090] (11) a VH region as depicted in SEQ ID NO: 107 and a VL region as depicted in SEQ ID NO: 108;
[0091] (12) a VH region as depicted in SEQ ID NO: 117 and a VL region as depicted in SEQ ID NO: 118;
[0092] (13) a VH region as depicted in SEQ ID NO: 127 and a VL region as depicted in SEQ ID NO: 128;
[0093] (14) a VH region as depicted in SEQ ID NO: 137 and a VL region as depicted in SEQ ID NO: 138;
[0094] (15) a VH region as depicted in SEQ ID NO: 147 and a VL region as depicted in SEQ ID NO: 148;
[0095] (16) a VH region as depicted in SEQ ID NO: 157 and a VL region as depicted in SEQ ID NO: 158;
[0096] (17) a VH region as depicted in SEQ ID NO: 167 and a VL region as depicted in SEQ ID NO: 168;
[0097] (18) a VH region as depicted in SEQ ID NO: 177 and a VL region as depicted in SEQ ID NO: 178;
[0098] (19) a VH region as depicted in SEQ ID NO: 187 and a VL region as depicted in SEQ ID NO: 188;
[0099] (20) a VH region as depicted in SEQ ID NO: 197 and a VL region as depicted in SEQ ID NO: 198;
[0100] (21) a VH region as depicted in SEQ ID NO: 207 and a VL region as depicted in SEQ ID NO: 208;
[0101] (22) a VH region as depicted in SEQ ID NO: 217 and a VL region as depicted in SEQ ID NO: 218;
[0102] (23) a VH region as depicted in SEQ ID NO: 227 and a VL region as depicted in SEQ ID NO: 228;
[0103] (24) a VH region as depicted in SEQ ID NO: 237 and a VL region as depicted in SEQ ID NO: 238;
[0104] (25) a VH region as depicted in SEQ ID NO: 247 and a VL region as depicted in SEQ ID NO: 248;
[0105] (26) a VH region as depicted in SEQ ID NO: 257 and a VL region as depicted in SEQ ID NO: 258;
[0106] (27) a VH region as depicted in SEQ ID NO: 267 and a VL region as depicted in SEQ ID NO: 268;
[0107] (28) a VH region as depicted in SEQ ID NO: 277 and a VL region as depicted in SEQ ID NO: 278;
[0108] (29) a VH region as depicted in SEQ ID NO: 287 and a VL region as depicted in SEQ ID NO: 288;
[0109] (30) a VH region as depicted in SEQ ID NO: 297 and a VL region as depicted in SEQ ID NO: 298;
[0110] (31) a VH region as depicted in SEQ ID NO: 307 and a VL region as depicted in SEQ ID NO: 308;
[0111] (32) a VH region as depicted in SEQ ID NO: 317 and a VL region as depicted in SEQ ID NO: 318;
[0112] (33) a VH region as depicted in SEQ ID NO: 327 and a VL region as depicted in SEQ ID NO: 328;
[0113] (34) a VH region as depicted in SEQ ID NO: 337 and a VL region as depicted in SEQ ID NO: 338;
[0114] (35) a VH region as depicted in SEQ ID NO: 347 and a VL region as depicted in SEQ ID NO: 348;
[0115] (36) a VH region as depicted in SEQ ID NO: 357 and a VL region as depicted in SEQ ID NO: 358;
[0116] (37) a VH region as depicted in SEQ ID NO: 367 and a VL region as depicted in SEQ ID NO: 368;
[0117] (38) a VH region as depicted in SEQ ID NO: 377 and a VL region as depicted in SEQ ID NO: 378;
[0118] (39) a VH region as depicted in SEQ ID NO: 387 and a VL region as depicted in SEQ ID NO: 388;
[0119] (40) a VH region as depicted in SEQ ID NO: 397 and a VL region as depicted in SEQ ID NO: 398;
[0120] (41) a VH region as depicted in SEQ ID NO: 407 and a VL region as depicted in SEQ ID NO: 408;
[0121] (42) a VH region as depicted in SEQ ID NO: 417 and a VL region as depicted in SEQ ID NO: 418;
[0122] (43) a VH region as depicted in SEQ ID NO: 427 and a VL region as depicted in SEQ ID NO: 428;
[0123] (44) a VH region as depicted in SEQ ID NO: 437 and a VL region as depicted in SEQ ID NO: 438;
[0124] (45) a VH region as depicted in SEQ ID NO: 447 and a VL region as depicted in SEQ ID NO: 448;
[0125] (46) a VH region as depicted in SEQ ID NO: 457 and a VL region as depicted in SEQ ID NO: 458;
[0126] (47) a VH region as depicted in SEQ ID NO: 467 and a VL region as depicted in SEQ ID NO: 468;
[0127] (48) a VH region as depicted in SEQ ID NO: 477 and a VL region as depicted in SEQ ID NO: 478;
[0128] (49) a VH region as depicted in SEQ ID NO: 487 and a VL region as depicted in SEQ ID NO: 488;
[0129] (50) a VH region as depicted in SEQ ID NO: 497 and a VL region as depicted in SEQ ID NO: 498;
[0130] (51) a VH region as depicted in SEQ ID NO: 507 and a VL region as depicted in SEQ ID NO: 508;
[0131] (52) a VH region as depicted in SEQ ID NO: 517 and a VL region as depicted in SEQ ID NO: 518; and
[0132] (53) a VH region as depicted in SEQ ID NO: 527 and a VL region as depicted in SEQ ID NO: 528.
   Item 18. The antibody construct according to any one of the preceding items, wherein the first domain which binds to BCMA comprises or consists of a polypeptide having an amino acid sequence selected from the group consisting of SEQ ID NOs: 9, 19, 29, 39, 49, 59, 69, 79, 89, 109, 129, 139, 149, 159, 169, 179, 189, 199, 209, 219, 229, 239, 249, 259, 269, 279, 289, 299, 309, 319, 329, 339, 349, 359, 369, 379, 389, 399, 409, 419, 429, 439, 449, 459, 469, 479, 489, 499, 519, and 529, preferably SEQ ID NO: 179.
   Item 19. The antibody construct according to any one of the preceding items, wherein the second domain which binds to CD3 comprises a VL region comprising CDR-L1, CDR-L2 and CDR-L3 selected from the group consisting of:
[0133] (a) CDR-L1 as depicted in SEQ ID NO: 542, CDR-L2 as depicted in SEQ ID NO: 543, and CDR-L3 as depicted in SEQ ID NO: 544;
[0134] (b) CDR-L1 as depicted in SEQ ID NO: 599, CDR-L2 as depicted in SEQ ID NO: 600, and CDR-L3 as depicted in SEQ ID NO: 601; and
[0135] (c) CDR-L1 as depicted in SEQ ID NO: 621, CDR-L2 as depicted in SEQ ID NO: 622, and CDR-L3 as depicted in SEQ ID NO: 623.
   Item 20. The antibody construct according to any one of the preceding items, wherein the second domain which binds to CD3 comprises a VH region comprising CDR-H1, CDR-H2 and CDR-H3 selected from the group consisting of:
[0136] (a) CDR-H1 as depicted in SEQ ID NO: 534, CDR-H2 as depicted in SEQ ID NO: 535, and CDR-H3 as depicted in SEQ ID NO: 536;
[0137] (b) CDR-H1 as depicted in SEQ ID NO: 545, CDR-H2 as depicted in SEQ ID NO: 546, and CDR-H3 as depicted in SEQ ID NO: 547;
[0138] (c) CDR-H1 as depicted in SEQ ID NO: 557, CDR-H2 as depicted in SEQ ID NO: 558, and CDR-H3 as depicted in SEQ ID NO: 559;
[0139] (d) CDR-H1 as depicted in SEQ ID NO: 568, CDR-H2 as depicted in SEQ ID NO: 569, and CDR-H3 as depicted in SEQ ID NO: 570;
[0140] (e) CDR-H1 as depicted in SEQ ID NO: 579, CDR-H2 as depicted in SEQ ID NO: 580, and CDR-H3 as depicted in SEQ ID NO: 581;
[0141] (f) CDR-H1 as depicted in SEQ ID NO: 591, CDR-H2 as depicted in SEQ ID NO: 592, and CDR-H3 as depicted in SEQ ID NO: 593;
[0142] (g) CDR-H1 as depicted in SEQ ID NO: 602, CDR-H2 as depicted in SEQ ID NO: 603, and CDR-H3 as depicted in SEQ ID NO: 604;
[0143] (h) CDR-H1 as depicted in SEQ ID NO: 613, CDR-H2 as depicted in SEQ ID NO: 614, and CDR-H3 as depicted in SEQ ID NO: 615;
[0144] (i) CDR-H1 as depicted in SEQ ID NO: 624, CDR-H2 as depicted in SEQ ID NO: 625, and CDR-H3 as depicted in SEQ ID NO: 626; and
[0145] (j) CDR-H1 as depicted in SEQ ID NO: 636, CDR-H2 as depicted in SEQ ID NO: 637, and CDR-H3 as depicted in SEQ ID NO: 638.
   Item 21. The antibody construct according to any one of the preceding items, wherein the second domain which binds to CD3 comprises a VL region comprising CDR-L1, CDR-L2 and CDR-L3 and a VH region comprising CDR-H1, CDR-H2 and CDR-H3 selected from the group consisting of:
[0146] (a) CDR-L1 as depicted in SEQ ID NO: 531, CDR-L2 as depicted in SEQ ID NO: 532, CDR-L3 as depicted in SEQ ID NO: 533, CDR-H1 as depicted in SEQ ID NO: 534, CDR-H2 as depicted in SEQ ID NO: 535, and CDR-H3 as depicted in SEQ ID NO: 536;
[0147] (b) CDR-L1 as depicted in SEQ ID NO: 542, CDR-L2 as depicted in SEQ ID NO: 543, CDR-L3 as depicted in SEQ ID NO: 544, CDR-H1 as depicted in SEQ ID NO: 545, CDR-H2 as depicted in SEQ ID NO: 546, and CDR-H3 as depicted in SEQ ID NO: 547;
[0148] (c) CDR-L1 as depicted in SEQ ID NO: 554, CDR-L2 as depicted in SEQ ID NO: 555, CDR-L3 as depicted in SEQ ID NO: 556, CDR-H1 as depicted in SEQ ID NO: 557, CDR-H2 as depicted in SEQ ID NO: 558, and CDR-H3 as depicted in SEQ ID NO: 559;
[0149] (d) CDR-L1 as depicted in SEQ ID NO: 565, CDR-L2 as depicted in SEQ ID NO: 566, CDR-L3 as depicted in SEQ ID NO: 567, CDR-H1 as depicted in SEQ ID NO: 568, CDR-H2 as depicted in SEQ ID NO: 569, and CDR-H3 as depicted in SEQ ID NO: 570;
[0150] (e) CDR-L1 as depicted in SEQ ID NO: 576, CDR-L2 as depicted in SEQ ID NO: 577, CDR-L3 as depicted in SEQ ID NO: 578, CDR-H1 as depicted in SEQ ID NO: 579, CDR-H2 as depicted in SEQ ID NO: 580, and CDR-H3 as depicted in SEQ ID NO: 581;
[0151] (f) CDR-L1 as depicted in SEQ ID NO: 588, CDR-L2 as depicted in SEQ ID NO: 589, CDR-L3 as depicted in SEQ ID NO: 590, CDR-H1 as depicted in SEQ ID NO: 591, CDR-H2 as depicted in SEQ ID NO: 592, and CDR-H3 as depicted in SEQ ID NO: 593;
[0152] (g) CDR-L1 as depicted in SEQ ID NO: 599, CDR-L2 as depicted in SEQ ID NO: 600, CDR-L3 as depicted in SEQ ID NO: 601, CDR-H1 as depicted in SEQ ID NO: 602, CDR-H2 as depicted in SEQ ID NO: 603, and CDR-H3 as depicted in SEQ ID NO: 604;
[0153] (h) CDR-L1 as depicted in SEQ ID NO: 610, CDR-L2 as depicted in SEQ ID NO: 611, CDR-L3 as depicted in SEQ ID NO: 612, CDR-H1 as depicted in SEQ ID NO: 613, CDR-H2 as depicted in SEQ ID NO: 614, and CDR-H3 as depicted in SEQ ID NO: 615;
[0154] (i) CDR-L1 as depicted in SEQ ID NO: 621, CDR-L2 as depicted in SEQ ID NO: 622, CDR-L3 as depicted in SEQ ID NO: 623, CDR-H1 as depicted in SEQ ID NO: 624, CDR-H2 as depicted in SEQ ID NO: 625, and CDR-H3 as depicted in SEQ ID NO: 626; and
[0155] (j) CDR-L1 as depicted in SEQ ID NO: 633, CDR-L2 as depicted in SEQ ID NO: 634, CDR-L3 as depicted in SEQ ID NO: 635, CDR-H1 as depicted in SEQ ID NO: 636, CDR-H2 as depicted in SEQ ID NO: 637, and CDR-H3 as depicted in SEQ ID NO: 638.
   Item 22. The antibody construct according to any one of the preceding items, wherein the second domain which binds to CD3 comprises a VL region having an amino acid sequence selected from the group consisting of those depicted in SEQ ID NO: 550, SEQ ID NO: 551, SEQ ID NO: 584, SEQ ID NO: 585, SEQ ID NO: 629 and SEQ ID NO: 630, preferably SEQ ID NO: 629.
   Item 23. The antibody construct according to any one of the preceding items, wherein the second domain which binds to CD3 comprises a VH region having an amino acid sequence selected from the group consisting of those depicted in SEQ ID NO: 537, SEQ ID NO: 538, SEQ ID NO: 548, SEQ ID NO: 549, SEQ ID NO: 560, SEQ ID NO: 561, SEQ ID NO: 571, SEQ ID NO: 572, SEQ ID NO: 582, SEQ ID NO: 583, SEQ ID NO: 594, SEQ ID NO: 595, SEQ ID NO: 605, SEQ ID NO: 606, SEQ ID NO: 616, SEQ ID NO: 617, SEQ ID NO: 627, SEQ ID NO: 628, SEQ ID NO: 639, SEQ ID NO: 640, and SEQ ID NO: 644, preferably SEQ ID NO: 639.
   Item 24. The antibody construct according to any one of the preceding items, wherein the second domain which binds to CD3 comprises a VL region and a VH region selected from the group consisting of:
[0156] (a) a VL region as depicted in SEQ ID NO: 539 or 521 and a VH region as depicted in SEQ ID NO: 537 or 538;
[0157] (b) a VL region as depicted in SEQ ID NO: 550 or 521 and a VH region as depicted in SEQ ID NO: 548 or 549;
[0158] (c) a VL region as depicted in SEQ ID NO: 562 or 521 and a VH region as depicted in SEQ ID NO: 560 or 561;
[0159] (d) a VL region as depicted in SEQ ID NO: 573 or 521 and a VH region as depicted in SEQ ID NO: 571 or 572;
[0160] (e) a VL region as depicted in SEQ ID NO: 584 or 585 and a VH region as depicted in SEQ ID NO: 582 or 583;
[0161] (f) a VL region as depicted in SEQ ID NO: 596 or 521 and a VH region as depicted in SEQ ID NO: 594 or 595;
[0162] (g) a VL region as depicted in SEQ ID NO: 607 or 585 and a VH region as depicted in SEQ ID NO: 605 or 606;
[0163] (h) a VL region as depicted in SEQ ID NO: 618 or 521 and a VH region as depicted in SEQ ID NO: 616 or 617;
[0164] (i) a VL region as depicted in SEQ ID NO: 629 or 630 and a VH region as depicted in SEQ ID NO: 627 or 628;
[0165] (j) a VL region as depicted in SEQ ID NO: 641 or 630 and a VH region as depicted in SEQ ID NO: 639 or 640; and
[0166] (k) a VL region as depicted in SEQ ID NO: 645 and a VH region as depicted in SEQ ID NO: 644.
   Item 25. The antibody construct according to any one of the preceding items, wherein the second domain which binds to CD3 comprises or consists of a polypeptide having an amino acid sequence selected from the group consisting of those depicted in SEQ ID NOs: 540, 541, 552, 553, 563, 564, 574, 575, 586, 587, 597, 598, 608, 609, 619, 620, 631, 632, 642, 643, and 646, preferably SEQ ID NO: 642.
   Item 26. The antibody construct according to any one of the preceding items, which comprises a polypeptide having an amino acid sequence selected from the group consisting of those depicted in SEQ ID NOs: 10, 20, 30, 40, 50, 60, 70, 80, 90, 100, 110, 120, 130, 140, 150, 160, 170, 180, 190, 200, 210, 220, 230, 240, 250, 260, 270, 280, 290, 300, 310, 320, 330, 340, 350, 360, 370, 380, 390, 400, 410, 420, 430, 440, 450, 460, 470, 480, 490, 500, 510, 520, and 530.
   Item 27. The antibody construct according to any one of the preceding items, comprising in an N- to C-terminal order:
   [0167] (a) the first domain;
   [0168] (b) a peptide linker having an amino acid sequence selected from the group consisting of SEQ ID NOs: 687, 693 and 694;
   [0169] (c) the second domain;
   [0170] (d) a peptide linker having an amino acid sequence selected from the group consisting of SEQ ID NO: 686, 687, 688, 689, 690, 691, 692, 693 or 694;
   [0171] (e) a first polypeptide monomer (comprising a hinge, a CH2 domain and a CH3 domain);
   [0172] (f) a peptide linker having an amino acid sequence selected from the group consisting of SEQ ID NOs: 695, 696, 697, 698 or 699; and
   [0173] (g) a second polypeptide monomer (comprising a hinge, a CH2 domain and a CH3 domain).
      Item 28. The antibody construct according to any one of the preceding items, comprising in an N- to C-terminal order:
   [0174] (a) the first domain having an amino acid sequence selected from the group consisting of SEQ ID NOs: 9, 19, 29, 39, 49, 59, 69, 79, 89, 109, 129, 139, 149, 159, 169, 179, 189, 199, 209, 219, 229, 239, 249, 259, 269, 279, 289, 299, 309, 319, 329, 339, 349, 359, 369, 379, 389, 399, 409, 419, 429, 439, 449, 459, 469, 479, 489, 499, 519, and 529; wherein the peptide linker comprised within those sequences and having SEQ ID NO: 694 can be replaced by any one of SEQ ID NOs: 686-693 and 695-699;
   [0175] (b) a peptide linker having an amino acid sequence selected from the group consisting of SEQ ID NOs: 687, 693 and 694;
   [0176] (c) the second domain having an amino acid sequence selected from the group consisting of SEQ ID NOs: 540, 541, 552, 553, 563, 564, 574, 575, 586, 587, 597, 598, 608, 609, 619, 620, 631, 632, 642, 643, and 646; wherein the peptide linker comprised within those sequences and having SEQ ID NO: 694 can be replaced by any one of SEQ ID NOs: 686-693 and 695-699;
   [0177] (d) a peptide linker having an amino acid sequence selected from the group consisting of SEQ ID NOs: 686, 687, 688, 689, 690, 691, 692, 693, and 694; and
   [0178] (e) the third domain having an amino acid sequence selected from the group consisting of SEQ ID NOs: 700-707.
      Item 29. The antibody construct according to any one of the preceding items, comprising in an N- to C-terminal order:
   [0179] (a) a polypeptide having an amino acid sequence selected from the group consisting of those depicted in SEQ ID NOs: 10, 20, 30, 40, 50, 60, 70, 80, 90, 100, 110, 120, 130, 140, 150, 160, 170, 180, 190, 200, 210, 220, 230, 240, 250, 260, 270, 280, 290, 300, 310, 320, 330, 340, 350, 360, 370, 380, 390, 400, 410, 420, 430, 440, 450, 460, 470, 480, 490, 500, 510, 520, and 530;
   [0180] (b) a linker having an amino acid sequence as depicted in SEQ ID NO: 686; and
   [0181] (c) a polypeptide having an amino acid sequence as depicted in SEQ ID NO: 700.
      Item 30. The antibody construct according to any one of the preceding items, which has a molecular weight of about 75 to about 200 kDa, about 80 to about 175 kDa, about 85 to about 150 kDa, about 90 to about 130 kDa, about 95 to about 120 kDa, and preferably about 100 to about 115 kDa or about 105 to about 110 kDa.
      Item 31. The antibody construct according to any one of the preceding items, which has an elimination half-life (T₂) of about 3 to about 14 days, about 4 to about 12 days, about 3 or 4 to about 10 days, about 3 or 4 to about 8 days, or about 5 to about 7 days.

### BRIEF DESCRIPTION OF THE DRAWINGS

[0182] FIG. 1 shows an exemplary dose exploration of AMG 701.

[0183] FIG. 2 shows a week 1 step dosing optimization protocol.

### DETAILED DESCRIPTION OF THE INVENTION

[0184] It is hence an object of the present invention to provide an administration scheme for a half-life extended anti-BCMA×anti-CD3 antibody construct which provides for a favorable safety and tolerability profile, while resulting in a positive efficacy signal in BCMA positive neoplasms.

[0185] The present invention therefore relates to an antibody construct comprising a first domain which binds to BCMA, a second domain which binds to CD3 and a third domain which extends the half-life of the antibody construct, for use in the treatment or amelioration of a BCMA positive neoplasm, wherein the antibody construct is administered at a minimum dose of 800 μg/day in at least one cycle, wherein one cycle comprises at least three individual administrations of the antibody construct.

[0186] Moreover, the invention relates to a method for the treatment or amelioration of a BCMA positive neoplasm, comprising administering an antibody construct comprising a first domain which binds to BCMA, a second domain which binds to CD3 and a third domain which extends the half-life of the antibody construct to a subject in need thereof, wherein the antibody construct is administered at a minimum dose of 800 μg/day in at least one cycle, wherein one cycle comprises at least three individual administrations of the antibody construct.

[0187] The invention further relates to the use of an antibody construct comprising a first domain which binds to BCMA, a second domain which binds to CD3 and a third domain which extends the half-life of the antibody construct, for the manufacture of a medicament for the treatment of a BCMA positive neoplasm, wherein the antibody construct is administered at a minimum dose of 800 μg/day in at least one cycle, wherein one cycle comprises at least three individual administrations of the antibody construct.

[0188] The invention also relates to the use of an antibody construct comprising a first domain which binds to BCMA, a second domain which binds to CD3 and a third domain which extends the half-life of the antibody construct, for the treatment or amelioration of a BCMA positive neoplasm, wherein the antibody construct is administered at a minimum dose of 800 μg/day in at least one cycle, wherein one cycle comprises at least three individual administrations of the antibody construct.

[0189] A “neoplasm” is an abnormal growth of tissue, usually but not always forming a mass. When also forming a mass, it is commonly referred to as a “tumor”. In brain tumors, the uncontrolled division of cells means that the mass of a neoplasm increases in size, and in a confined space such as the intracranial cavity this quickly becomes problematic because the mass invades the space of the brain pushing it aside, leading to compression of the brain tissue and increased intracranial pressure and destruction of parenchyma. According to the invention, the term “neoplasm” or “tumor” also refers to a condition that would benefit from treatment with the antibody construct as described herein. This includes chronic and acute disorders or diseases, including those pathological conditions that predispose a mammal to the condition (neoplasm or tumor) in question.

[0190] Neoplasms or tumors can be benign, potentially malignant (pre-cancerous), or malignant (cancerous). Malignant neoplasms/tumors are commonly called cancer. They usually invade and destroy the surrounding tissue and may form metastases, i.e., they spread to other parts, tissues or organs of the body. A “primary tumor” is a tumor growing at the anatomical site where tumor progression began and proceeded to yield a cancerous mass. For example, a brain tumor occurs when abnormal cells form within the brain. Most cancers develop at their primary site but then go on to form metastases or spread to other parts (e.g. tissues and organs) of the body. These further tumors are secondary tumors. Most cancers continue to be called after their primary site, even after they have spread to other parts of the body.

[0191] Lymphomas and leukemias are hematopoietic or lymphoid neoplasms. Multiple Myeloma (MM), also known as plasma cell myeloma, is a cancer of plasma cells, a type of white blood cells that normally produce antibodies. For the purposes of the present invention, lymphomas and leukemias as well as MM are also encompassed by the terms “tumor”, “cancer” or “neoplasm”. Lymphoma is a group of blood cancers that develop from lymphocytes (a type of white blood cell). Leukemia is a group of cancers that usually begin in the bone marrow and result in high numbers of abnormal white blood cells. These white blood cells are not fully developed and are called blasts or leukemia cells. Lymphomas and leukemias are a part of the broader group of tumors of the hematopoietic and lymphoid tissues.

[0192] For the purposes of the present invention, the terms “neoplasm”, “tumor” and “cancer” may be used interchangeably, and they comprise both primary tumors/cancers and secondary tumors/cancers (or “metastases”), as well as mass-forming neoplasms (tumors) and lymphoid neoplasms (such as lymphomas and leukemias), and also MRD.

[0193] The term “minimal residual disease” (MRD) refers to the evidence for the presence of small numbers of residual cancer cells that remain in the patient after cancer treatment, e.g. when the patient is in remission (the patient has no symptoms or signs of disease). A very small number of remaining cancer cells usually cannot be detected by routine means because the standard tests used to assess or detect cancer are not sensitive enough to detect MRD. Nowadays, very sensitive molecular biology tests for MRD are available, such as flow cytometry, PCR and next-generation sequencing. These tests can measure minimal levels of cancer cells in tissue samples, sometimes as low as one cancer cell in a million normal cells. In the context of the present invention, the terms “prevention”, “treatment” or “amelioration” of a neoplasm are envisaged to also encompass “prevention, treatment or amelioration of MRD”, whether the MRD was detected or not.

[0194] Is it envisaged that the BCMA positive neoplasm is a B cell neoplasm or a plasma cell neoplasm. B cells, also known as B lymphocytes, are a type of white blood cell of the lymphocyte subtype. They function in the humoral immunity component of the adaptive immune system by secreting antibodies. Additionally, B cells present antigen (they are also classified as professional antigen-presenting cells) and secrete cytokines. In mammals, B cells mature in the bone marrow, which is at the core of most bones. B cells, unlike the other two classes of lymphocytes—T cells and natural killer (NK) cells—express B cell receptors (BCRs) on their cell membrane. BCRs allow the B cell to bind to a specific antigen, against which it will initiate an antibody response. Plasma cells, also called plasma B cells, plasmocytes, or effector B cells, are white blood cells that secrete large volumes of antibodies. They are usually transported by the blood plasma and the lymphatic system. Plasma cells originate in the bone marrow. B cells differentiate into plasma cells that produce antibody molecules closely modelled after the receptors of the precursor B cell. Once released into the blood and lymph, these antibody molecules bind to the target antigen and initiate its neutralization or destruction.

[0195] The level of expression of BCMA on the cell surface can be determined e.g. by flow cytometry analysis. The subpopulation of cells (e.g. B cells, plasma cells, MM cells, CD138+ cells) that is selected for analysis of BCMA expression can e.g. be stained with an anti-BCMA antibody, followed by a secondary antibody, and then analyzed in a FACS assay. A BCMA negative cell line (such as K562, A549, TC71, CCRF-CEM) can be used as control. A shift in the FACS assay (with the BCMA negative cell line defining 0% BCMA expression) indicates that the cells to be analyzed are BCMA positive. Different levels of BCMA expression can exist on the surface cells, such as low, medium or high expression. See also Quinn et al., Blood (2011) 117:890-901 and Sanchez et al, Br J Heamatol 2012 Jul. 18.

[0196] The “BCMA positive neoplasm” or the “(BCMA positive) B cell neoplasm or plasma cell neoplasm” can be selected from the group including, but not limited to, multiple myeloma, relapsed and/or refractory multiple myeloma, heavy chain multiple myeloma, light chain multiple myeloma, extramedullary myeloma (extramedullary plasmacytoma, extramedullary multiple myeloma), plasmacytoma, plasma cell leukemia, Waldenström's macroglobulinemia (lymphoplasmacytic lymphoma), and smoldering myeloma (smoldering multiple myeloma). The present disclosure hence also relates to an antibody construct for use in the treatment or amelioration of multiple myeloma (MM), plasmacytoma, plasma cell leukemia and Waldenström's macroglobulinemia, as described herein. The MM can be selected from the group consisting of or comprising relapsed and/or refractory multiple myeloma, heavy chain multiple myeloma, light chain multiple myeloma, extramedullary multiple myeloma, and smoldering multiple myeloma.

[0197] The antibody construct of the invention (and the pharmaceutical composition comprising such antibody construct) is/are useful in the treatment, amelioration and/or prevention of the BCMA positive neoplasm as described herein in a subject in need thereof. The term “treatment” refers to both therapeutic treatment and prophylactic or preventative measures. Treatment includes the administration of the antibody construct (or the pharmaceutical composition comprising such antibody construct) to the patient's body, to an isolated tissue, or to a cell from a patient or a subject in need who has a BCMA positive neoplasm as described herein, a symptom of such neoplasm, or a predisposition toward such neoplasm, with the purpose to cure, heal, alleviate, relieve, alter, remedy, ameliorate, improve, or affect the BCMA positive neoplasm, one or more symptoms of the BCMA positive neoplasm, or the predisposition toward the disease.

[0198] The terms “subject in need”, “patient” or those “in need of treatment” include those already with the BCMA positive neoplasm, as well as those in an MRD setting and those in which the neoplasm is to be prevented. The terms also include human and other mammalian subjects that receive either prophylactic or therapeutic treatment.

[0199] The term “amelioration” as used herein refers to any improvement of the disease state (the disease being a BCMA positive neoplasm) of a patient, by the administration of an antibody construct according to the invention to such patient or subject in need thereof. Such an improvement may be seen as a slowing down the progression or stopping the progression of the disease of the patient, and/or as a decrease in severity of disease symptoms, an increase in frequency or duration of disease symptom-free periods or a prevention of impairment or disability due to the disease.

[0200] The term “prevention” as used herein means the avoidance of the occurrence or of the re-occurrence of a disease as specified herein, by the administration of an antibody construct according to the invention to a subject in need thereof.

[0201] In the case of Multiple Myeloma, the symptoms and signs vary greatly because many organs can be affected by the disease. The common symptoms of multiple myeloma include elevated calcium levels, renal failure, anemia, and bone lesions (together, “CRAB” features). In advanced MM, bone pain, bleeding, and frequent infections may occur. Complications may also include amyloidosis. The International Myeloma Working Group (IMWG) has established criteria for the diagnosis of MM which teach, in addition to the classic CRAB features, three “myeloma defining events” (MDEs):
[0202] 60% or greater clonal plasma cells on bone marrow examination
[0203] Serum involved/uninvolved free light chain ratio of 100 or greater, provided the absolute level of the involved light chain is at least 100 mg/L (a patient's “involved” free light chain-either kappa or lambda—is the one that is above the normal reference range; the “uninvolved” free light chain is the one that is typically in, or below, the normal range)
[0204] More than one focal lesion on MRI (magnetic resonance imaging) that is at least 5 mm or greater in size The presence of at least one of these markers is considered sufficient for a diagnosis of multiple myeloma, regardless of the presence or absence of symptoms or CRAB features. See also Palumbo A. J Clin Oncol. 2014 Feb. 20; 32(6):587-600.

[0205] Bone pain affects almost 70% of patients and is the most common symptom. It usually involves the spine and ribs. Involvement of the vertebrae may lead to spinal cord compression or kyphosis. Myeloma bone disease is due to the overexpression of receptor activator for nuclear factor KB ligand (RANKL) by bone marrow stroma. RANKL activates osteoclasts, which resorb bone. The resultant bone lesions are lytic (i.e. they cause breakdown) in nature, and are best seen in plain radiographs. The breakdown of bone also leads to the release of calcium into the blood, leading to hypercalcemia and its associated symptoms.

[0206] The anemia found in myeloma is usually normocytic and normochromic. It results from the replacement of normal bone marrow by infiltrating tumor cells and inhibition of normal red blood cell production (hematopoiesis) by cytokines.

[0207] A bone marrow biopsy can be performed to estimate the percentage of bone marrow occupied by plasma cells. This percentage is used in the diagnostic criteria for MM. Usually, MM patients have ≥10% clonal bone marrow plasma cells. Immunohistochemistry (staining particular cell types using antibodies against surface proteins) can detect plasma cells which express immunoglobulin in the cytoplasm and occasionally on the cell surface; for example, myeloma cells are typically positive for the markers CD56, CD38, CD138, CD319, but other markers may be included as well to define or identify MM.

[0208] The so-called “paraprotein” (also called myeloma protein, monoclonal protein or M protein) is an abnormal immunoglobulin fragment that is produced in excess by an abnormal monoclonal proliferation of plasma cells, typically in MM. In theory, MM patients can produce all classes of immunoglobulin, but IgG paraproteins are most common, followed by IgA and IgM, while IgD and IgE myeloma are very rare. In addition, antibody light chains and/or heavy chains may be secreted in isolation: kappa or lambda light chains or any of the five types of heavy chains (alpha, gamma, delta, epsilon or my (p)-heavy chains). This proliferation of the paraprotein has several deleterious effects on the body, including impaired immune function, abnormally high blood viscosity, and kidney damage. Patients without evidence of paraprotein may have “nonsecretory” myeloma (not producing immunoglobulins); they represent approximately 3% of all MM patients. The presence of serum and/or urinary paraprotein is an indicator for MM, except in patients with true nonsecretory MM. Quantitative measurements of the paraprotein in urine and/or serum of a patient can be used to establish a diagnosis and/or to monitor the disease.

[0209] Kidney failure may develop both acutely and chronically. The most common cause of kidney failure in MM is due to proteins secreted by the malignant cells. Myeloma cells produce monoclonal proteins of varying types, most commonly immunoglobulins (antibodies) and free light chains, resulting in abnormally high levels of these proteins (paraproteins) in the blood. Depending on the size of these proteins, they may be excreted through the kidneys, but kidneys can also be damaged by their effects. Furthermore, increased bone resorption leads to hypercalcemia and causes nephrocalcinosis, thereby contributing to the kidney failure.

[0210] The most common infections occurring in MM are pneumonias and pyelonephritis. The increased risk of infection is due to immune deficiency. Although the total immunoglobulin level is typically elevated in MM, the majority of the antibodies are ineffective monoclonal antibodies from the clonal plasma cell.

[0211] It is envisaged that the administration of the antibody construct in the treatment or amelioration of a BCMA positive neoplasm according to the invention
[0212] reduces the level of paraprotein or free light chain in the urine and/or serum by at least about 20%, at least about 30%, at least about 40%, at least about 50%, at least about 60%, at least about 70%, at least about 80%, or at least about 90% relative to the paraprotein or free light chain level in the urine and/or serum, respectively, prior to the start of the treatment, i.e. prior to the first administration of the antibody construct (“prior to”, in this specific context, means within 1, 2, 4, 6, 8, or 12 hours before, within 1, 2, 3, 4, 5 or 6 days before, within 1, 2, 3 or 4 weeks before, or within 1, 2, 3 or 4 months before);
[0213] reduces the percentage of plasma cells in the bone marrow by at least about 20%, at least about 30%, at least about 40%, at least about 50%, at least about 60%, at least about 70%, at least about 80%, or at least about 90% relative to the percentage of plasma cells in the bone marrow prior to the start of the treatment, i.e. prior to the first administration of the antibody construct (“prior to”, in this specific context, means within 1, 2, 4, 6, 8, or 12 hours before, within 1, 2, 3, 4, 5 or 6 days before, within 1, 2, 3 or 4 weeks before, or within 1, 2, 3 or 4 months before);
[0214] induces a reduction of any of the symptoms described above by at least about 20%, at least about 30%, at least about 40%, at least about 50%, at least about 60%, at least about 70%, at least about 80%, or at least about 90% relative to the symptoms prior to the start of the treatment, i.e. to the first administration of the antibody construct (“prior to”, in this specific context, means within 1, 2, 4, 6, 8, or 12 hours before, within 1, 2, 3, 4, 5 or 6 days before, within 1, 2, 3 or 4 weeks before, or within 1, 2, 3 or 4 months before, depending on the symptom);
[0215] inhibits tumor growth or tumor cell proliferation by at least about 20%, at least about 30%, at least about 40%, at least about 50%, at least about 60%, at least about 70%, at least about 80%, or at least about 90% relative to untreated patients or relative to untreated cells; and/or
[0216] induces lysis of the cells of the BCMA positive neoplasm of at least about 20%, at least about 30%, at least about 40%, at least about 50%, at least about 60%, at least about 70%, at least about 80%, or at least about 90% relative to untreated patients or relative to untreated cells.

[0217] The ability of an antibody construct of the invention to inhibit tumor growth/tumor cell proliferation or to induce cell lysis may be evaluated in an animal model predictive of efficacy in human tumors, or in an in vitro or ex vivo study (such as depletion of BCMA positive cells by autologous T cells from a multiple myeloma patient's BM aspirate induced by the antibody construct). Efficacy assessments of the antibody construct may furthermore be performed as follows: Tumor assessment can be done by analysis of percent myeloma involvement, by FISH (fluorescent in situ hybridization) as well as by karyotyping in the bone marrow (BM). Data for BM karyotyping and FISH may be obtained from a BM sample. Serum protein electrophoresis (SPEP) and urine protein electrophoresis (UPEP) allow for measurement of serum/urine M protein. Immunofixation is another means to detect serum and/or urine M protein. It is also envisaged that serum free light chain assay and ratio analysis can be performed. In case of free light chain (FLC) multiple myeloma, FLC can be analyzed in serum and urine (sFLC and uFLC). Levels of involved/uninvolved FLC, ratio of monoclonal lambda-FLC/kappa-FLC, and ratio of monoclonal kappa-FLC/lambda-FLC can be determined. Furthermore, quantitative and qualitative immunoglobulin (Ig) can also be analyzed, and beta-2 microglobulin in serum can be assessed. It is also envisaged that skeletal survey and plasmacytoma assessments can be performed. Screening imaging to evaluate for extramedullary relapse using whole-body MRI or PET/CT can be performed. Imaging appropriate for assessment of bone lesions includes, but is not limited to, CT scan, MRI, PET, PET-CT, or other standard-of-care method. It is also envisaged that minimal residual disease is measured by a next generation sequencing (NGS) based assay. For this purpose, bone marrow aspirates can be collected from subjects suspected to be complete responders. Plasma samples can additionally be collected from subjects at the same time points as BM MRD samples are collected, to assess the feasibility of MRD detection on ctDNA (circulating tumor DNA). MRD response may be defined as <1 tumor cell/10⁴ normal cells in the bone marrow per FACS using antibodies to cytIgλ, cytIgκ, CD19, CD56 or CD138, CD38, and CD45, as needed. In one embodiment of the invention, these markers are a sufficient condition to define a tumor cell in the context of the present invention.

[0218] It is envisaged that a patient's or subject's response to the administration of the antibody construct according to the invention is measured in one of the following ways:
[0219] quantitative measurement of the paraprotein (M protein) or free light chain in the urine and/or serum;
[0220] determination of the percentage of plasma cells in the bone marrow; and/or
[0221] imaging (CT, MRI) of extramedullary manifestations.

[0222] The invention provides an antibody construct comprising a first domain which binds to BCMA, a second domain which binds to CD3 and a third domain which extends the half-life of the antibody construct, for use in the treatment or amelioration of a BCMA positive neoplasm, wherein the antibody construct is administered at a minimum dose of 800 μg/day in at least one cycle, wherein one cycle comprises at least three individual administrations of the antibody construct.

[0223] The antibody construct of the invention is administered in at least one cycle, but more cycles of administration such as 2, 3, 4, 5, 6, 7, 8, 9, 10, 11, 12, 13, 14, 15, 16, 17, 18, 19, 20, 21, 22, 23, 24, 25 or more are also envisaged. The term “at least one cycle” means “one or more cycles”. According to the invention, “one cycle” corresponds to a period of about 25 to about 30 or 31 days, of about 26 or 27 to about 29 days, preferably of about 28 days or four weeks. A cycle begins with the first administration of the antibody construct of the invention on “day 1”. One cycle may immediately be followed by a subsequent cycle, but an administration-free interval between two cycles is also envisaged. The different administration cycles do not have to be fully identical. In particular, it is envisaged that the first cycle may differ from the following cycles, in particular in terms of the dose of the antibody construct.

[0224] The term “a minimum dose of . . . ” means “a dose of at least . . . ”. The dose of the antibody construct is between 800 μg per day and 12 mg per day. It may be 1000 μg, 1200 μg, 1500 μg, 1600 μg, 2000 μg, 2500 μg, 3000 μg, 3500 μg, 4000 μg, 4500 μg, 5000 μg, 5500 μg, 6000 μg, 6500 μg, 7000 μg, 7500 μg, 8000 μg, 8500 μg, 9000 μg, 9500 μg, 10 mg, 11 mg or 12 mg per day.

[0225] The dose (the daily dose) of the antibody construct to be administered in the first cycle may be stable throughout the cycle, or it may increase in one or two steps. In this context, “stable” or “stable throughout the cycle” means that the dose to be administered daily (such as 800 μg) is identical/constant in each administration within the cycle. In contrast, a “step” or “dose step” means that there is an increase in the dose (daily dose) to be administered from one administration to the subsequent administration. One dose step within a cycle means that a first dose to be administered on one day is followed by a second (higher) dose to be administered on a subsequent day. Accordingly, two dose steps within a cycle mean that a first dose is followed by a second dose which is higher than the first dose, and the second dose is followed by a third dose which is higher than the second dose. In case there are one or two steps, (at least) the last dose to be administered in the first cycle is the so-called “target dose”. The target dose is envisaged to be between 6500 μg per day and 12 mg per day. The target dose may be e.g. 6500 μg, 7000 μg, 7500 μg, 8000 μg, 8500 μg, 9000 μg, 9500 μg, 10 mg, 11 mg or 12 mg per day. It is envisaged that the target dose is reached on day 3, on day 4, on day 5, on day 6, on day 7, on day 8, on day 9 or on day 10 of the first cycle. In case there are one or two steps in the first cycle, it is envisaged the first dose to be administered on day 1 is between 800 μg and 1200 μg per day. In case there are two steps in the first cycle, the second dose to be administered is envisaged to be between 2500 μg and 5000 μg per day, preferably about 3000 μg or about 4500 μg per day. In case there are two steps in the first cycle, the second dose is envisaged to be administered on day 3, day 4 or day 5.

[0226] One cycle comprises at least three individual administrations of the antibody construct, preferably four individual administrations. This means that the subject in need receives the antibody construct of the invention at least three times during a cycle, preferably four times. For example, if a cycle consists of four weeks, the subject in need may be administered with the antibody construct once per week. An “individual administration” hence means the administration of a specified dose as defined above on one day. Within one cycle, such individual administration is followed by a period (of usually at least one day) in which the antibody construct is not administered. It is also envisaged that the first cycle comprises or consists of three to six individual administrations, preferably four or five individual administrations of the antibody construct. It is envisaged that the last two or three administrations within the first cycle are at the target dose.

[0227] In the first cycle, it is envisaged that the antibody construct is administered on day 1 (d1). Further or subsequent days of administration in the first cycle are envisaged to be d3 or d4 or d5. Further days of administration are envisaged to be d7 or d8 or d9. Further days of administration are envisaged to be d11 or d12 or d13. Further days of administration are envisaged to be d14 or d15 or d16. Further days of administration are envisaged to be d18 or d19 or d20. Further days of administration are envisaged to be d21 or d22 or d23.

[0228] According to one embodiment, the first cycle begins with the administration of 800 μg of the antibody construct on day 1. According to a further embodiment, the administration of the antibody construct in the first cycle continues as follows:
[0229] e) administration of the target dose on day 8 (+/− one or two days), day 15 (+/− one or two days) and day 22 (+/− one or two days), wherein the target dose may be e.g. 3000 μg, 3500 μg, 4000 μg, 4500 μg, 5000 μg, 5500 μg, 6000 μg, 6500 μg, 7000 μg, 7500 μg, 8000 μg, 8500 μg, 9000 μg, 9500 μg, 10 mg, 11 mg or 12 mg per day;
[0230] f) administration of the target dose on day 4 or day 5 (+/− one or two days), day 12 (+/− one or two days) and day 19 (+/− one or two days), wherein the target dose may be as defined in a);
[0231] g) administration of the target dose on day 3 or day 4 (+/− one or two days), day 8 (+/− one or two days), day 15 (+/− one or two days) and day 22 (+/− one or two days), wherein the target dose may be as defined in a); or
[0232] h) administration of a second dose (higher than 800 μg per day) on day 3 or day 4 (+/− one or two days), and of the target dose on day 8 (+/− one or two days), day 15 (+/− one or two days) and day 22 (+/− one or two days). The second dose is envisaged to be between 2500 μg and 5000 μg per day, preferably about 3000 μg or about 4500 μg per day, and the target dose may be as defined in a) and must be higher than the second dose.

[0233] It is envisaged that the antibody construct is administered during the second cycle and optionally during any subsequent cycle at constant doses (constant daily doses). No dose steps are envisaged for the second cycle and optionally for any subsequent cycle. Beginning with the second cycle, it is envisaged that the antibody construct is administered at the target dose. The target dose is envisaged to be between 6500 μg and 12 mg per day. The target dose may be e.g. 6500 μg, 7000 μg, 7500 μg, 8000 μg, 8500 μg, 9000 μg, 9500 μg, 10 mg, 11 mg or 12 mg per day. It is envisaged that beginning with the second cycle, the antibody construct is administered in weekly intervals. For example, the administration in the second and any subsequent cycle is on d1, d8 (+/− one or two days), d15 (+/− one or two days) and d22 (+/− one or two days).

[0234] Preferred administration schemes are depicted in FIGS. 1 and 2.

[0235] It is envisaged that the antibody construct of the invention has a molecular weight of about 75 to about 200 kDa, about 80 to about 175 kDa, about 85 to about 150 kDa, about 90 to about 130 kDa, about 95 to about 120 kDa, and preferably about 100 to about 115 kDa or about 105 to about 110 kDa.

[0236] The antibody construct of the present invention comprises a domain (the “third domain”) which extends or enhances the half-life or the elimination half-life of the construct. The term “extends” or “enhances” may be defined with respect to or in comparison to an antibody construct not comprising such a domain (an “HLE domain”). It is envisaged that the half-life or the elimination half-life of the antibody construct of the invention is at least twice longer than the half-life or the elimination half-life of the antibody construct not comprising the third domain, or at least five times longer, or at least ten times longer, or at least 20 times longer.

[0237] The third domain may alternatively be defined as a domain which provides the antibody construct of the invention with a “half-life” or “terminal half-life” or “elimination half-life” (T_{1/2}) of about 3 to about 14 days, about 4 to about 12 days, about 3 or 4 to about 10 days, about 3 or 4 to about 8 days, or about 5 to about 7 days. “Half-life” is the time required for a quantity to reduce to half its initial value. The medical sciences refer to the half-life of substances or drugs (here: the antibody construct) in the human body, e.g. in the serum or in the plasma. Therefore, the “half-life” is sometimes also referred to as “serum half-life” or “plasma half-life”. It can be determined by measuring the concentration of the administered antibody construct in the serum/plasma of a subject. Typically, the elimination or removal of an administered substance/drug refers to the body's cleansing through biological processes such as metabolism, excretion, also involving the function of kidneys and liver. “Elimination half-life” may be defined as the time required for the concentration of the drug (here: the antibody construct of the invention) to reach half of its original value.

[0238] The antibody construct of the invention will generally be designed for specific routes and methods of administration. A route of administration in pharmacology is the path by which a substance is taken into the body. Routes of administration are generally classified by the location at which the substance is applied, these can be topical (local), enteral (system-wide effect of the substance, but delivered through the gastrointestinal tract), or parenteral (systemic action of the substance, but delivered by routes other than the gastrointestinal tract). In the context of the present invention, the routes of administration include topical, enteral and parenteral routes. The reason for the choice of routes of drug administration are governed by various factors such as:
[0239] Physical and chemical properties of the drug. The physical properties are solid, liquid and gas. The chemical properties are solubility, stability, pH, irritancy etc.
[0240] Site of desired action: The action may be localized and approachable or generalized and not approachable.
[0241] Rate of extent of absorption of the drug from different routes.
[0242] Condition of the patient.

[0243] The antibody construct of this invention (and a pharmaceutical composition comprising this antibody construct) is particularly useful for parenteral administration. Parenteral administration generally acts more rapidly than topical or enteral administration, and often comes along with a very high bioavailability of up to 100% (in particular, in the case of IV administration). In general, parenteral administration includes, but is not limited to, intravenous (IV), intracerebral, intraarterial, intraperitoneal, intraosseous, and intravesical delivery.

[0244] The administration according to the present invention is preferably intravenous. Parenteral or intravenous administration can be performed by injection (e.g. using a needle and a syringe) or by infusion (e.g. via a catheter and a pump system). It is hence envisaged that the administration according to the present invention is via intravenous injection or via intravenous infusion. Usually, an IV infusion is administered via a line, a port or a catheter (small, flexible tube), such as a central venous access or a central venous catheter (CVC) which is a catheter placed into a large vein, or a peripheral venous catheter (PVC), which is a catheter placed into a peripheral vein. In general, catheters or lines can be placed in veins in the neck (internal jugular vein), chest (subclavian vein or axillary vein), groin (femoral vein), or through veins in the arms (also known as a PICC line, or peripherally inserted central catheters). Central IV lines have their catheters that are advanced through a vein and empty into a large central vein, usually the superior vena cava, inferior vena cava or even the right atrium of the heart. A peripheral intravenous (PIV) line is used on peripheral veins (the veins in the arms, hands, legs and feet). A port is a central venous line that does not have an external connector; instead, it has a small reservoir that is covered with silicone rubber and is implanted under the skin. Medication is administered intermittently by placing a small needle through the skin, piercing the silicone, into the reservoir. When the needle is withdrawn, the reservoir cover reseals itself. The cover can accept hundreds of needle sticks during its lifetime.

[0245] The present invention provides for a bolus administration of the antibody construct of the invention. A bolus is the administration of a discrete amount of a medication, drug, or other compound within a specific negligible time, generally within 1-30 minutes. In most cases, the bolus administration is given intravenously. A bolus is usually administered via injection (e.g. an intravenous bolus injection), but a bolus infusion (e.g. an intravenous bolus infusion) is also possible. A short-term infusion is an infusion (usually an IV infusion), of a relatively small volume (such as 50 mL to 500 mL, or 100 mL to 250 mL), which is administered over a period of, at most, three hours, usually of 30 to 60 minutes or about 60 minutes. A short-term (or short-term IV) infusion of the antibody construct is envisaged by the present invention.

[0246] Intravenous “intermittent infusion” is an infusion of a volume of medication over a set period of time, such as 20-120 minutes or 30-60 minutes, at prescribed intervals, such as every 4, 6, 8, 10, 12, 14, 16, 18, 20, 22 or 24 hours. The purpose is to administer small amounts of medication at regular intervals. An intermittent medication—like any other form of infusion—may be administered by gravity or via an electronic infusion device (EID), also known as an infusion pump.

[0247] In the case of an infusion, an infusion pump may be used to infuse the medication (antibody construct) into a patient's circulatory system. The pump is generally used intravenously, although arterial and epidural infusions with pumps are also possible. The solution for infusion may be prepared in bags for IV infusion and delivered through infusion lines. Infusion pumps can administer fluids in ways that would be unreliable if performed manually. For example, they can administer as little as 0.1 mL per hour injections, injections every minute, injections with repeated boluses, up to a maximum number per hour, or fluids whose volumes vary by the time of day. It is also possible that infusions are administered using only the pressure supplied by gravity. Different types of infusions according to the present invention include, but are not limited to, bolus infusion, short-term infusion, and intermittent infusion. The antibody construct of the present invention may hence be administered e.g. as a bolus administration (bolus injection or bolus infusion), as an injection, or as a short-term infusion, for example over a period of about 30 to about 90 minutes or about 60 minutes.

[0248] Pharmaceutical compositions may be administered using a medical device. Examples of medical devices for administering pharmaceutical compositions are described in U.S. Pat. Nos. 4,475,196; 4,439,196; 4,447,224; 4,447, 233; 4,486,194; 4,487,603; 4,596,556; 4,790,824; 4,941,880; 5,064,413; 5,312,335; 5,312,335; 5,383,851; and 5,399,163.

[0249] In the context of the present invention, it is envisaged that a premedication is administered prior to each administration (or “individual administration”) of the antibody construct, in particular during the first cycle. It is envisaged that “prior to”, in this specific context, means within 24 hours, 18 hours, twelve hours, six hours, five hours, four hours, or three hours, and preferably within 120, 90, 60 or 30 minutes before the administration of the antibody construct. The premedication may e.g. be administered 30-120 or 30-60 minutes prior to the administration of the antibody construct. It is also envisaged that a comedication is administered concurrent with or after the start of administration of the antibody construct in the first cycle, and optionally also concurrent with or after the start of administration of the antibody construct in one or more of the following cycles, as needed by the patient. It is envisaged that “after”, in this specific context, means within 24 hours, 18 hours, twelve hours, six hours, five hours, four hours, or three hours, and preferably within 120, 90, 60, 30, 20, 15 or 10 minutes after the start of administration of the antibody construct. The comedication may e.g. be administered 10-120, 10-60, 10-30 or 15-20 minutes after start of administration of the antibody construct. The purpose of the premedication or comedication may be e.g. to prevent or reduce severity of infusion-related reactions. Premedication is preferred over comedication.

[0250] The premedication or comedication may include any one or a combination of the following:
[0251] Paracetamol (acetaminophen, APAP) or an equivalent; to be preferably administered orally (p.o.) or intravenously; and to be preferably administered at a dose of 100-4000 mg, preferably 200-3000 mg or 300-2500 mg or 400-2000 mg or 500-1500 mg, preferably 600-1400 mg, 700-1300 mg, 800-1200 mg, 900-1100 mg or about 1000 mg p.o. paracetamol (or an equivalent dose for an equivalent medication and/or another route of administration). The skilled person knows how to identify paracetamol equivalents. They include, but are not limited to, ibuprofen (to be administered e.g. at a dose of 100-3200 mg, preferably 200-3000 mg or 300-2500 mg or 400-2000 mg, preferably 500-1500 mg, 600-1200 mg, 700-1000 mg, 750-900 mg or about 800 mg) and metamizole (to be administered e.g. at a dose of 100-4000 mg, preferably 200-3000 mg or 300-2500 mg or 400-2000 mg, or about 500-1000 mg)
[0252] One or more analgesics selected from meperidine, dipyrone, hydromorphone, fentanyl, and tramadol
[0253] Antihistamine, to be preferably administered orally or intravenously, and to be preferably administered at a dose equivalent to diphenhydramine 50 mg i.v. The skilled person knows how to identify antihistamines. They include, but are not limited to, antihistamines of oral, parenteral or rectal route such as: azatadine (maximum dose e.g. 4 mg/day), brompheniramine (maximum dose e.g. 30 mg/day), cetirizine (maximum dose e.g. 15 mg/day), chlorpheniramine (maximum dose e.g. 30 mg/day), clemastine (maximum dose e.g. 10 mg/day), cyproheptadine (maximum dose e.g. 15 mg/day), desloratadine (maximum dose e.g. 7 mg/day), dexchlorpheniramine (maximum dose e.g. 15 mg/day), diphenhydramine (maximum dose e.g. 350/per day), doxylamine (maximum dose e.g. 180 mg/day), fexofenadine (maximum dose e.g. 200 mg/day), loratadine (maximum dose e.g. 15 mg/day), phenindamine (maximum dose e.g. 180 mg/day)
[0254] Glucocorticoid, to be preferably administered orally or intravenously, and to be preferably administered at a dose equivalent to 2-20 mg or 4-16 mg or 6-12 mg or 8 mg dexamethasone i.v. (the equivalence referring to the glucocorticoid potency)

[0255] All four substances or substance groups listed above may be administered as premedication or comedication, or a combination of only two or a combination of three substances, or only one of the four substances. It is envisaged that the glucocorticoid (GC) dose administered before the start of the second cycle may be identical to the GC dose administered before start of the first cycle, or may be reduced to about 50% of the dose administered before start of the first cycle, or may be omitted for the second (and/or potentially any subsequent) cycle. A reduction of the GC dosage may apply e.g. if the antibody construct according to the invention is well tolerated without significant signs of infusion-related reactions during the first cycle. It is furthermore envisaged that the dose may further be reduced before start of the third and any subsequent cycle. Alternatively, while GC is administered as premedication (and potentially comedication) before the start of the first cycle, no GC premedication or comedication is administered in the second, third, fourth and/or fifth cycle. In general, the dose of the premedication or comedication that is to be used in accordance with the embodiments of the present invention will depend on the circumstances of the individual patient.

[0256] Glucocorticoids are a class of corticosteroids, which are a class of steroid hormones. Glucocorticoids are corticosteroids that bind to the glucocorticoid receptor. A less common synonym is glucocorticosteroid. Cortisol (known as hydrocortisone when used as a medication) is the most important human glucocorticoid. A variety of synthetic glucocorticoids, some far more potent than cortisol, have been created for therapeutic use. They differ in both pharmacokinetics (e.g. absorption factor, half-life, volume of distribution, clearance) and pharmacodynamics (e.g. glucocorticoid potency or mineralocorticoid potency). Cortisol is the standard of comparison for glucocorticoid potency. One example for commonly prescribed replacement steroid equivalents may be prednisone (5 mg)=cortisone (25 mg)=dexamethasone (0.75 mg)=hydrocortisone (20 mg)=methylprednisolone (4 mg). These doses indicate the equivalent pharmacologic dose of systemic glucocorticoids. Another corticosteroid comparison chart indicating the half-lives of the different substances can be found e.g. in www.nadf.us/downloads/adrenalhormone.pdf. Corticosteroid conversion calculators or equivalency tables are available in the internet.

[0257] Examples of GCs to be used as premedication or comedication in the present embodiment include, but are not limited to, cortisone, hydrocortisone, prednisone, prednisolone, methylprednisolone, dexamethasone, betamethasone, beclomethasone, budesonide, triamcinolone, cloprednol, deflazacort, fluocortolone, cortivazol, paramethasone, fluticasone, fluticasone propionate, triamcinolone acetonide, as well as combinations and/or pharmaceutically acceptable derivatives thereof. In the context of the present invention, the different GCs may be used alone or in combination. Dexamethasone, prednisone and prednisolone are preferred embodiments of GCs.

[0258] It is envisaged that all substances which already are or will be classified as a “glucocorticoid” may be employed in the context of the present invention as well. Such future glucocorticoids include compounds which specifically bind to and activate the glucocorticoid receptor. The term “specifically binds to the GC receptor” means in accordance with the present invention that the GC (or a compound which is assumed to act like a GC) associates with (e.g., interacts with) the GC receptor (also known as NR3C1) to a statistically significant degree as compared to association with proteins/receptors generally (i.e., non-specific binding).

[0259] When the GC receptor binds to glucocorticoids, its primary mechanism of action is the regulation of gene transcription. In the absence of GC, the glucocorticoid receptor (GR) resides in the cytosol complexed with a variety of proteins including heat shock protein 90 (hsp90), heat shock protein 70 (hsp70) and the protein FKBP52 (FK506-binding protein 52). Binding of the GC to the glucocorticoid receptor results in release of the heat shock proteins. It is thus envisaged that a future GC, or a pharmaceutically acceptable derivative or salt of a GC, is able to bind to the GC receptor and to release the above mentioned heat shock proteins.

[0260] The activated GR complex then up-regulates the expression of anti-inflammatory proteins in the nucleus or represses the expression of pro-inflammatory proteins in the cytosol by preventing the translocation of other transcription factors from the cytosol into the nucleus.

[0261] The antibody construct of the present invention comprises a first domain which binds to BCMA, a second domain which binds to CD3 and a third domain which extends (or enhances) the half-life of the antibody construct.

[0262] The term “antibody construct” refers to a molecule in which the structure and/or function is/are based on the structure and/or function of an antibody, e.g., of a full-length immunoglobulin molecule. An antibody construct hence immunospecifically binds to its target or antigen, and/or it comprises domains which are derived from or which are the heavy chain variable region (VH) and/or the light chain variable region (VL) of an antibody. Furthermore, an antibody construct according to the invention comprises the minimum structural requirements of an antibody which allow for immunospecific target binding. This minimum requirement may e.g. be defined by the presence of at least three light chain CDRs (i.e. CDR1, CDR2 and CDR3 of the VL region) and/or three heavy chain CDRs (i.e. CDR1, CDR2 and CDR3 of the VH region), preferably of all six CDRs.

[0263] Within the definition of “antibody” according to the invention are full-length antibodies, also including camelid antibodies and other immunoglobulins generated by biotechnological or protein engineering methods or processes. These full-length antibodies may be for example monoclonal, recombinant, chimeric, deimmunized, humanized and human antibodies, as well as antibodies from other species such as mouse, hamster, rabbit, rat, goat, or non-human primates.

[0264] “Antibody constructs” of the present invention may have the general structure of a full-length immunoglobulin as it occurs naturally. For example, they may comprise (at least) two full-length antibody heavy chains and two full-length antibody light chains. However, given that the antibody constructs according to the invention comprise one domain binding to BCMA and another domain binding to CD3, they do not occur naturally, and they are markedly different in their function from naturally occurring products. An antibody construct of the invention is hence an artificial “hybrid” molecule comprising at least two distinct binding domains with different specificities.

[0265] “Antibody constructs” of the present invention may also comprise fragments of full-length antibodies, such as VH, VHH, VL, (s)dAb, Fv, light chain (VL-CL), Fd (VH-CH1), heavy chain, Fab, Fab′, F(ab′)₂ or “r IgG” (“half antibody” consisting of a heavy chain and a light chain). Antibody constructs according to the invention may also comprise modified fragments of antibodies, also called antibody variants or antibody derivatives. Examples include, but are not limited to, scFv, di-scFv or bi(s)-scFv, scFv-Fc, scFv-zipper, scFab, Fab₂, Fab₃, diabodies, single chain diabodies, tandem diabodies (Tandab's), tandem di-scFv, tandem tri-scFv, “minibodies” exemplified by a structure which is as follows: (VH-VL-CH3)₂, (scFv-CH3)₂, ((scFv)₂-CH3+CH3), ((scFv)₂-CH3) or (scFv-CH3-scFv)₂, multibodies such as triabodies or tetrabodies, and single domain antibodies such as nanobodies or single variable domain antibodies comprising merely one variable region, which might be VHH, VH or VL, that specifically binds to an antigen or target independently of other variable regions or domains. Further possible formats of the antibody constructs according to the invention are cross bodies, maxi bodies, hetero Fc constructs, mono Fc constructs and scFc constructs.

[0266] Furthermore, the definition of the term “antibody construct” includes bivalent and polyvalent/multivalent constructs, which specifically bind to two, three or more antigenic structures, through distinct binding domains. An antibody construct can hence have more binding valences than specificities, e.g. in a case where it has two binding domains for the first target (BCMA) and one binding domain for the second target (CD3)—or vice versa—in which case the construct is trivalent and bispecific. Moreover, the definition of the term “antibody construct” includes molecules consisting of only one polypeptide chain (“single-chain polypeptide”) as well as molecules consisting of two, three, four or more polypeptide chains, which chains can be either identical (homodimers, homotrimers or homo oligomers) or different (heterodimer, heterotrimer or heterooligomer). Examples for the above identified antibodies and their fragments, variants, derivatives and antibody constructs derived therefrom are described inter alia in Harlow and Lane, Antibodies: A laboratory manual, CSHL Press (1988); Kontermann and Dubel, Antibody Engineering, Springer, 2nd ed. 2010; and Little, Recombinant Antibodies for Immunotherapy, Cambridge University Press 2009. It is envisaged that the antibody construct of the present invention is a single chain antibody construct/a single chain polypeptide.

[0267] The term “binding domain” or “domain which binds to . . . ” characterizes in connection with the present invention a domain of the antibody construct which immunospecifically binds to/interacts with/recognizes a given epitope on the target or antigen (here: BCMA in the case of the first domain, and CD3 in the case of the second domain). The structure and function of the first domain (binding to BCMA), and preferably also the structure and/or function of the second domain (binding to CD3), is/are based on the structure and/or function of an antibody, e.g. of a full-length immunoglobulin molecule. The “binding domain” or “domain which binds to . . . ” may hence comprise the minimum structural requirements of an antibody which allow for immunospecific target binding. This minimum structural requirement of the first domain may e.g. be defined by the presence of at least three light chain CDRs (i.e. CDR1, CDR2 and CDR3 of the VL region) and/or of three heavy chain CDRs (i.e. CDR1, CDR2 and CDR3 of the VH region), preferably of all six CDRs. It is envisaged that the second domain also comprises this minimum structural requirement of an antibody which allow for the immunospecific target binding. More preferably, the second domain also comprises at least three light chain CDRs (i.e. CDR1, CDR2 and CDR3 of the VL region) and/or three heavy chain CDRs (i.e. CDR1, CDR2 and CDR3 of the VH region), preferably all six CDRs. A “domain which binds to” (or a “binding domain”) may typically comprise an antibody light chain variable region (VL) and an antibody heavy chain variable region (VH); however, it does not have to comprise both, but may comprise only one of VH or VL. Fd fragments, for example, often retain some antigen-binding function of the intact antigen-binding domain.

[0268] Examples for the format of a “domain which binds to” (or a “binding domain”) include, but are not limited to, full-length antibodies, fragments of full-length antibodies (such as VH, VHH, VL), (s)dAb, Fv, light chain (VL-CL), Fd (VH-CH1), heavy chain, Fab, Fab′, F(ab′)₂ or “r IgG” (“half antibody”)), antibody variants or derivatives such as scFv, di-scFv or bi(s)-scFv, scFv-Fc, scFv-zipper, scFab, Fab₂, Fab₃, diabodies, single chain diabodies, tandem diabodies (Tandab's), tandem di-scFv, tandem tri-scFv, “minibodies” (selected from formats such as (VH-VL-CH3)₂, (scFv-CH3)₂, ((scFv)₂-CH3+CH3)), ((scFv)₂-CH3) or (scFv-CH3-scFv)₂, multibodies such as triabodies or tetrabodies, and single domain antibodies such as nanobodies or single variable domain antibodies comprising merely one variable region, which might be VHH, VH or VL. Further examples for the format of a “domain which binds to” (or a “binding domain”) include (1) an antibody fragment or variant comprising VL, VH, CL and CH1 (such as Fab); (2) an antibody fragment or variant comprising two linked Fab fragments (such as a F(ab′)₂); (3) an antibody fragment or variant comprising VH and CH₁ (such as Fd); (4) an antibody fragment or variant comprising VL and CL (such as the light chain); (5) an antibody fragment or variant comprising VL and VH (such as Fv); (5) a dAb fragment (Ward et al., (1989) Nature 341:544-546), which has a VH domain; (6) an antibody variant comprising at least three isolated CDRs of the heavy and/or the light chain; and (7) a single chain Fv (scFv). Examples for embodiments of antibody constructs or binding domains according to the invention are e.g. described in WO 00/006605, WO 2005/040220, WO 2008/119567, WO 2010/037838, WO 2013/026837, WO 2013/026833, US 2014/0308285, US 2014/0302037, W 02014/144722, WO 2014/151910, and WO 2015/048272.

[0269] The terms “(specifically or immunospecifically) binds to”, “(specifically or immunospecifically) recognizes”, or “(specifically or immunospecifically) reacts with” mean in accordance with this invention that an antibody construct or a binding domain interacts or (immuno-)specifically interacts with a given epitope on the target molecule (antigen), here: BCMA and CD3, respectively. This interaction or association occurs more frequently, more rapidly, with greater duration, with greater affinity, or with some combination of the aforementioned, to an epitope on the specific target than to alternative substances (non-target molecules). Because of the sequence similarity between homologous proteins in different species, an antibody construct or a binding domain that immunospecifically binds to its target (such as a human target) may, however, cross-react with homologous target molecules from different species (such as, from non-human primates, e.g. macaque). The term “specific/immunospecific binding” can hence include the binding of an antibody construct or binding domain to epitopes or structurally related epitopes in more than one species.

[0270] In the context of the present invention, the term “epitope” refers to the part or region of the antigen that is recognized/immunospecifically recognized by the binding domain. An “epitope” is antigenic, and thus the term epitope is sometimes also referred to as “antigenic structure” or “antigenic determinant”. The part of the binding domain that binds to the epitope is called a paratope. Specific binding is believed to be accomplished by specific motifs in the amino acid sequence of the binding domain and the antigen. Thus, binding is achieved as a result of their primary, secondary and/or tertiary structure as well as the result of potential secondary modifications of said structures. The specific interaction of the paratope with its antigenic determinant may result in a simple binding of said site to the antigen. In some cases, the specific interaction may alternatively or additionally result in the initiation of a signal, e.g. due to the induction of a change of the conformation of the antigen, an oligomerization of the antigen, etc.

[0271] The epitopes of protein antigens are divided into two categories, conformational epitopes and linear epitopes, based on their structure and interaction with the paratope. A conformational epitope is composed of discontinuous sections of the antigen's amino acid sequence. These epitopes interact with the paratope based on the three-dimensional surface features and shape or tertiary structure (folding) of the antigen. Methods of determining the conformation of epitopes include, but are not limited to, x-ray crystallography, two-dimensional nuclear magnetic resonance (2D-NMR) spectroscopy and site-directed spin labelling and electron paramagnetic resonance (EPR) spectroscopy. By contrast, linear epitopes interact with the paratope based on their primary structure. A linear epitope is formed by a continuous sequence of amino acids from the antigen and typically includes at least 3 or at least 4, and more usually, at least 5 or at least 6 or at least 7, for example, about 8 to about 10 amino acids in a unique sequence.

[0272] The interaction between the binding domain and the epitope of the target antigen implies that a binding domain exhibits appreciable or significant affinity for the epitope/the target antigen (here: BCMA and CD3, respectively). In general, it does furthermore not exhibit significant affinity for proteins or antigens other than the target antigen (here: BCMA/CD3)—notwithstanding the above discussed cross-reactivity with homologous targets e.g. from other species. “Significant affinity” includes binding with an affinity (dissociation constant, KD) of ≤10⁻⁶ M. Preferably, binding is considered specific when the binding affinity is ≤10⁻⁷ M, ≤10⁻⁸ M, ≤10⁻⁹ M, ≤10⁻¹⁰ mM, or even 10⁻¹¹ M, or 10⁻¹² M. Whether a binding domain (immuno-)specifically reacts with or binds to a target can be tested readily e.g. by comparing the affinity of said binding domain to its desired target protein or antigen with the affinity of said binding domain to non-target proteins or antigens (here: proteins other than BCMA or CD3, respectively). Preferably, an antibody construct of the invention does not significantly bind to proteins or antigens other than BCMA or CD3, respectively (i.e., the first domain does not bind to proteins other than BCMA and the second domain does not bind to proteins other than CD3). For example, it is envisaged that the antibody construct of the invention (and more specifically its first domain) does not significantly bind to, interact with, recognize or cross-react with human BAFF-R and/or human TACI.

[0273] The equilibrium dissociation constant (KD) of an antibody construct of the invention to BCMA can be determined by Scatchard or by biacore analysis, as described e.g. in WO 2013/072406. The KD values for CD3 can e.g. be determined by surface plasmon resonance analysis, as described e.g. in WO 2013/072406. It is envisaged that the antibody construct of the present invention has a KD value for BCMA and/or for CD3 in the 2-digit or 1-digit nanomolar range or in the three digit or even two digit picomolar range.

[0274] The term “does not significantly bind” means that an antibody construct or binding domain of the present invention does not bind a protein or antigen other than BCMA or CD3, i.e., shows reactivity of ≤30%, preferably ≤20%, more preferably ≤10%, particularly preferably ≤9%, 8%, 7%, 6% or 5% with proteins or antigens other than BCMA or CD3, whereby binding to BCMA or CD3, respectively, is set to be 100%.

[0275] According to one embodiment of the antibody construct of the present invention, the first and/or the second domain are in the format of an scFv (single-chain variable fragment). An scFv is not actually a fragment of an antibody, but instead is a fusion protein of the variable regions of the heavy (VH) and light chains (VL) of immunoglobulins, connected with a short linker peptide. The linker is usually rich in glycine for flexibility, as well as serine or threonine for solubility. The scFv is designed to retain the specificity of the original immunoglobulin, despite removal of the constant regions and the introduction of the linker. In an scFv, the VH region and the and VL region are arranged in the order VH-VL or VL-VH (from N- to C-terminus). It is envisaged that the VH and the VL regions of the first and/or the second binding domain are connected via a linker, preferably a peptide linker. According to one embodiment of the first and/or the second domain, the VH-region is positioned N-terminally of the linker, and the VL-region is positioned C-terminally of the linker. It is furthermore envisaged that the first domain and the second domain of the antibody construct are connected via a linker, preferably a peptide linker. The linkers are preferably peptide linkers, more preferably short peptide linkers. Examples are shown in SEQ ID NOs: 686-699. In the present context, a “short” linker has between 2 and 50 amino acids, preferably between 3 and 35, between 4 and 30, between 5 and 25, between 6 and 20 or between 6 and 17 amino acids. The linker between two variable regions of one binding domain may have a different length (e.g. may be longer) than the linker between the two binding domains. For example, the linker between two variable regions of one binding domain may have a length between 7 and 15 amino acids, preferably between 9 and 13, and the linker between the two binding domains may have a length between 3 and 10 amino acids, preferably between 4 and 8. It is further envisaged that the peptide linkers are glycine/serine linkers, such as those depicted in SEQ ID NOs: 687, 689-699.

[0276] It is envisaged for the antibody construct of the present invention that

[0277] a) the antibody construct is a single chain polypeptide,

[0278] b) the first domain is in the format of an scFv,

[0279] c) the second domain is in the format of an scFv, and/or

[0280] d) the first and the second domain are connected via a linker, preferably a peptide linker, more preferably a glycine/serine linker.

[0281] The first domain of the antibody construct of the invention binds to BCMA (B cell maturation antigen, TNFRSF17, CD269). More preferably, it binds to BCMA on the surface of a target cell. The “target cell” can be any prokaryotic or eukaryotic cell expressing BCMA on its surface; preferably the target cell is a cell that is part of the human or animal body, such as a specific BCMA expressing cancer or tumor cell or a cell of a BCMA positive neoplasm. It is furthermore envisaged that the first domain binds to human BCMA, preferably to human BCMA on the surface of a target cell. It is also envisaged that the first domain binds to macaque BCMA, preferably to macaque BCMA on the surface of a target cell. A preferred amino acid sequence for human BCMA is depicted in SEQ ID NO: 647, for macaque BCMA in SEQ ID NO: 648, for the extracellular domain of human BCMA in SEQ ID NO: 649, for the extracellular domain of macaque BCMA in SEQ ID NO: 650.

[0282] In one embodiment of the present invention, the first domain of the antibody construct binds to epitope cluster 3 of BCMA. More preferably, it binds to epitope cluster 3 of human BCMA. A preferred amino acid sequence for epitope cluster 3 of human BCMA is depicted in SEQ ID NO: 651. Antibody constructs having domains that bind to said epitope cluster 3 of BCMA are described in detail in WO 2013/072406. These antibody constructs are shown in WO 2013/072406 to have a very beneficial epitope/activity relationship.

[0283] A method for BCMA epitope mapping is used in WO 2013/072406 and described in the following: One or more pre-defined regions (each in the form of a contiguous amino acid stretch) within the extracellular domain of human BCMA is exchanged/replaced with the corresponding region of a rodent BCMA molecule (such as murine BCMA, but other rodent species are also conceivable, so long as the binding domain is not cross-reactive with the rodent species used). These human BCMA/rodent (murine) BCMA chimeras are expressed on the surface of host cells (such as CHO cells). Binding of the antibody or antibody construct can be tested via FACS analysis. When the binding of the antibody or antibody construct to the chimeric molecule is entirely abolished, or when a significant binding decrease is observed, it can be concluded that the region of human BCMA which was removed from this chimeric molecule is relevant for the immunospecific epitope-paratope recognition. Said decrease in binding is preferably at least 10%, 20%, 30%, 40%, or 50%; more preferably at least 60%, 70%, or 80%, and most preferably 90%, 95% or even 100% in comparison to the binding to human (wild-type) BCMA, whereby binding to human BCMA is set to be 100%. Alternatively or additionally, the above described epitope mapping analysis can be modified by introducing one or more point mutations into the sequence of the extracellular domain of BCMA.

[0284] It is furthermore envisaged for the antibody construct of the present invention that the first domain which binds to BCMA comprises a VH region comprising CDR-H1, CDR-H2 and CDR-H3 and a VL region comprising CDR-L1, CDR-L2 and CDR-L3 selected from:
[0285] (1) CDR-H1 as depicted in SEQ ID NO: 1, CDR-H2 as depicted in SEQ ID NO: 2, CDR-H3 as depicted in SEQ ID NO: 3, CDR-L1 as depicted in SEQ ID NO: 4, CDR-L2 as depicted in SEQ ID NO: 5, and CDR-L3 as depicted in SEQ ID NO: 6;
[0286] (2) CDR-H1 as depicted in SEQ ID NO: 11, CDR-H2 as depicted in SEQ ID NO: 12, CDR-H3 as depicted in SEQ ID NO: 13, CDR-L1 as depicted in SEQ ID NO: 14, CDR-L2 as depicted in SEQ ID NO: 15, and CDR-L3 as depicted in SEQ ID NO: 16;
[0287] (3) CDR-H1 as depicted in SEQ ID NO: 21, CDR-H2 as depicted in SEQ ID NO: 22, CDR-H3 as depicted in SEQ ID NO: 23, CDR-L1 as depicted in SEQ ID NO: 24, CDR-L2 as depicted in SEQ ID NO: 25, and CDR-L3 as depicted in SEQ ID NO: 26;
[0288] (4) CDR-H1 as depicted in SEQ ID NO: 31, CDR-H2 as depicted in SEQ ID NO: 32, CDR-H3 as depicted in SEQ ID NO: 33, CDR-L1 as depicted in SEQ ID NO: 34, CDR-L2 as depicted in SEQ ID NO: 35, and CDR-L3 as depicted in SEQ ID NO: 36;
[0289] (5) CDR-H1 as depicted in SEQ ID NO: 41, CDR-H2 as depicted in SEQ ID NO: 42, CDR-H3 as depicted in SEQ ID NO: 43, CDR-L1 as depicted in SEQ ID NO: 44, CDR-L2 as depicted in SEQ ID NO: 45, and CDR-L3 as depicted in SEQ ID NO: 46;
[0290] (6) CDR-H1 as depicted in SEQ ID NO: 51, CDR-H2 as depicted in SEQ ID NO: 52, CDR-H3 as depicted in SEQ ID NO: 53, CDR-L1 as depicted in SEQ ID NO: 54, CDR-L2 as depicted in SEQ ID NO: 55, and CDR-L3 as depicted in SEQ ID NO: 56;
[0291] (7) CDR-H1 as depicted in SEQ ID NO: 61, CDR-H2 as depicted in SEQ ID NO: 62, CDR-H3 as depicted in SEQ ID NO: 63, CDR-L1 as depicted in SEQ ID NO: 64, CDR-L2 as depicted in SEQ ID NO: 65, and CDR-L3 as depicted in SEQ ID NO: 66;
[0292] (8) CDR-H1 as depicted in SEQ ID NO: 71, CDR-H2 as depicted in SEQ ID NO: 72, CDR-H3 as depicted in SEQ ID NO: 73, CDR-L1 as depicted in SEQ ID NO: 74, CDR-L2 as depicted in SEQ ID NO: 75, and CDR-L3 as depicted in SEQ ID NO: 76;
[0293] (9) CDR-H1 as depicted in SEQ ID NO: 81, CDR-H2 as depicted in SEQ ID NO: 82, CDR-H3 as depicted in SEQ ID NO: 83, CDR-L1 as depicted in SEQ ID NO: 84, CDR-L2 as depicted in SEQ ID NO: 85, and CDR-L3 as depicted in SEQ ID NO: 86;
[0294] (10) CDR-H1 as depicted in SEQ ID NO: 91, CDR-H2 as depicted in SEQ ID NO: 92, CDR-H3 as depicted in SEQ ID NO: 93, CDR-L1 as depicted in SEQ ID NO: 94, CDR-L2 as depicted in SEQ ID NO: 95, and CDR-L3 as depicted in SEQ ID NO: 96;
[0295] (11) CDR-H1 as depicted in SEQ ID NO: 101, CDR-H2 as depicted in SEQ ID NO: 102, CDR-H3 as depicted in SEQ ID NO: 103, CDR-L1 as depicted in SEQ ID NO: 104, CDR-L2 as depicted in SEQ ID NO: 105, and CDR-L3 as depicted in SEQ ID NO: 106;
[0296] (12) CDR-H1 as depicted in SEQ ID NO: 111, CDR-H2 as depicted in SEQ ID NO: 112, CDR-H3 as depicted in SEQ ID NO: 113, CDR-L1 as depicted in SEQ ID NO: 114, CDR-L2 as depicted in SEQ ID NO: 115, and CDR-L3 as depicted in SEQ ID NO: 116;
[0297] (13) CDR-H1 as depicted in SEQ ID NO: 121, CDR-H2 as depicted in SEQ ID NO: 122, CDR-H3 as depicted in SEQ ID NO: 123, CDR-L1 as depicted in SEQ ID NO: 124, CDR-L2 as depicted in SEQ ID NO: 125, and CDR-L3 as depicted in SEQ ID NO: 126;
[0298] (14) CDR-H1 as depicted in SEQ ID NO: 131, CDR-H2 as depicted in SEQ ID NO: 132, CDR-H3 as depicted in SEQ ID NO: 133, CDR-L1 as depicted in SEQ ID NO: 134, CDR-L2 as depicted in SEQ ID NO: 135, and CDR-L3 as depicted in SEQ ID NO: 136;
[0299] (15) CDR-H1 as depicted in SEQ ID NO: 141, CDR-H2 as depicted in SEQ ID NO: 142, CDR-H3 as depicted in SEQ ID NO: 143, CDR-L1 as depicted in SEQ ID NO: 144, CDR-L2 as depicted in SEQ ID NO: 145, and CDR-L3 as depicted in SEQ ID NO: 146;
[0300] (16) CDR-H1 as depicted in SEQ ID NO: 151, CDR-H2 as depicted in SEQ ID NO: 152, CDR-H3 as depicted in SEQ ID NO: 153, CDR-L1 as depicted in SEQ ID NO: 154, CDR-L2 as depicted in SEQ ID NO: 155, and CDR-L3 as depicted in SEQ ID NO: 156;
[0301] (17) CDR-H1 as depicted in SEQ ID NO: 161, CDR-H2 as depicted in SEQ ID NO: 162, CDR-H3 as depicted in SEQ ID NO: 163, CDR-L1 as depicted in SEQ ID NO: 164, CDR-L2 as depicted in SEQ ID NO: 165, and CDR-L3 as depicted in SEQ ID NO: 166;
[0302] (18) CDR-H1 as depicted in SEQ ID NO: 171, CDR-H2 as depicted in SEQ ID NO: 172, CDR-H3 as depicted in SEQ ID NO: 173, CDR-L1 as depicted in SEQ ID NO: 174, CDR-L2 as depicted in SEQ ID NO: 175, and CDR-L3 as depicted in SEQ ID NO: 176;
[0303] (19) CDR-H1 as depicted in SEQ ID NO: 181, CDR-H2 as depicted in SEQ ID NO: 182, CDR-H3 as depicted in SEQ ID NO: 183, CDR-L1 as depicted in SEQ ID NO: 184, CDR-L2 as depicted in SEQ ID NO: 185, and CDR-L3 as depicted in SEQ ID NO: 186;
[0304] (20) CDR-H1 as depicted in SEQ ID NO: 191, CDR-H2 as depicted in SEQ ID NO: 192, CDR-H3 as depicted in SEQ ID NO: 193, CDR-L1 as depicted in SEQ ID NO: 194, CDR-L2 as depicted in SEQ ID NO: 195, and CDR-L3 as depicted in SEQ ID NO: 196;
[0305] (21) CDR-H1 as depicted in SEQ ID NO: 201, CDR-H2 as depicted in SEQ ID NO: 202, CDR-H3 as depicted in SEQ ID NO: 203, CDR-L1 as depicted in SEQ ID NO: 204, CDR-L2 as depicted in SEQ ID NO: 205, and CDR-L3 as depicted in SEQ ID NO: 206;
[0306] (22) CDR-H1 as depicted in SEQ ID NO: 211, CDR-H2 as depicted in SEQ ID NO: 212, CDR-H3 as depicted in SEQ ID NO: 213, CDR-L1 as depicted in SEQ ID NO: 214, CDR-L2 as depicted in SEQ ID NO: 215, and CDR-L3 as depicted in SEQ ID NO: 216;
[0307] (23) CDR-H1 as depicted in SEQ ID NO: 221, CDR-H2 as depicted in SEQ ID NO: 222, CDR-H3 as depicted in SEQ ID NO: 223, CDR-L1 as depicted in SEQ ID NO: 224, CDR-L2 as depicted in SEQ ID NO: 225, and CDR-L3 as depicted in SEQ ID NO: 226;
[0308] (24) CDR-H1 as depicted in SEQ ID NO: 231, CDR-H2 as depicted in SEQ ID NO: 232, CDR-H3 as depicted in SEQ ID NO: 233, CDR-L1 as depicted in SEQ ID NO: 234, CDR-L2 as depicted in SEQ ID NO: 235, and CDR-L3 as depicted in SEQ ID NO: 236;
[0309] (25) CDR-H1 as depicted in SEQ ID NO: 241, CDR-H2 as depicted in SEQ ID NO: 242, CDR-H3 as depicted in SEQ ID NO: 243, CDR-L1 as depicted in SEQ ID NO: 244, CDR-L2 as depicted in SEQ ID NO: 245, and CDR-L3 as depicted in SEQ ID NO: 246;
[0310] (26) CDR-H1 as depicted in SEQ ID NO: 251, CDR-H2 as depicted in SEQ ID NO: 252, CDR-H3 as depicted in SEQ ID NO: 253, CDR-L1 as depicted in SEQ ID NO: 254, CDR-L2 as depicted in SEQ ID NO: 255, and CDR-L3 as depicted in SEQ ID NO: 256;
[0311] (27) CDR-H1 as depicted in SEQ ID NO: 261, CDR-H2 as depicted in SEQ ID NO: 262, CDR-H3 as depicted in SEQ ID NO: 263, CDR-L1 as depicted in SEQ ID NO: 264, CDR-L2 as depicted in SEQ ID NO: 265, and CDR-L3 as depicted in SEQ ID NO: 266;
[0312] (28) CDR-H1 as depicted in SEQ ID NO: 271, CDR-H2 as depicted in SEQ ID NO: 272, CDR-H3 as depicted in SEQ ID NO: 273, CDR-L1 as depicted in SEQ ID NO: 274, CDR-L2 as depicted in SEQ ID NO: 275, and CDR-L3 as depicted in SEQ ID NO: 276;
[0313] (29) CDR-H1 as depicted in SEQ ID NO: 281, CDR-H2 as depicted in SEQ ID NO: 282, CDR-H3 as depicted in SEQ ID NO: 283, CDR-L1 as depicted in SEQ ID NO: 284, CDR-L2 as depicted in SEQ ID NO: 285, and CDR-L3 as depicted in SEQ ID NO: 286;
[0314] (30) CDR-H1 as depicted in SEQ ID NO: 291, CDR-H2 as depicted in SEQ ID NO: 292, CDR-H3 as depicted in SEQ ID NO: 293, CDR-L1 as depicted in SEQ ID NO: 294, CDR-L2 as depicted in SEQ ID NO: 295, and CDR-L3 as depicted in SEQ ID NO: 296;
[0315] (31) CDR-H1 as depicted in SEQ ID NO: 301, CDR-H2 as depicted in SEQ ID NO: 302, CDR-H3 as depicted in SEQ ID NO: 303, CDR-L1 as depicted in SEQ ID NO: 304, CDR-L2 as depicted in SEQ ID NO: 305, and CDR-L3 as depicted in SEQ ID NO: 306;
[0316] (32) CDR-H1 as depicted in SEQ ID NO: 311, CDR-H2 as depicted in SEQ ID NO: 312, CDR-H3 as depicted in SEQ ID NO: 313, CDR-L1 as depicted in SEQ ID NO: 314, CDR-L2 as depicted in SEQ ID NO: 315, and CDR-L3 as depicted in SEQ ID NO: 316;
[0317] (33) CDR-H1 as depicted in SEQ ID NO: 321, CDR-H2 as depicted in SEQ ID NO: 322, CDR-H3 as depicted in SEQ ID NO: 323, CDR-L1 as depicted in SEQ ID NO: 324, CDR-L2 as depicted in SEQ ID NO: 325, and CDR-L3 as depicted in SEQ ID NO: 326;
[0318] (34) CDR-H1 as depicted in SEQ ID NO: 331, CDR-H2 as depicted in SEQ ID NO: 332, CDR-H3 as depicted in SEQ ID NO: 333, CDR-L1 as depicted in SEQ ID NO: 334, CDR-L2 as depicted in SEQ ID NO: 335, and CDR-L3 as depicted in SEQ ID NO: 336;
[0319] (35) CDR-H1 as depicted in SEQ ID NO: 341, CDR-H2 as depicted in SEQ ID NO: 342, CDR-H3 as depicted in SEQ ID NO: 343, CDR-L1 as depicted in SEQ ID NO: 344, CDR-L2 as depicted in SEQ ID NO: 345, and CDR-L3 as depicted in SEQ ID NO: 346;
[0320] (36) CDR-H1 as depicted in SEQ ID NO: 351, CDR-H2 as depicted in SEQ ID NO: 352, CDR-H3 as depicted in SEQ ID NO: 353, CDR-L1 as depicted in SEQ ID NO: 354, CDR-L2 as depicted in SEQ ID NO: 355, and CDR-L3 as depicted in SEQ ID NO: 356;
[0321] (37) CDR-H1 as depicted in SEQ ID NO: 361, CDR-H2 as depicted in SEQ ID NO: 362, CDR-H3 as depicted in SEQ ID NO: 363, CDR-L1 as depicted in SEQ ID NO: 364, CDR-L2 as depicted in SEQ ID NO: 365, and CDR-L3 as depicted in SEQ ID NO: 366;
[0322] (38) CDR-H1 as depicted in SEQ ID NO: 371, CDR-H2 as depicted in SEQ ID NO: 372, CDR-H3 as depicted in SEQ ID NO: 373, CDR-L1 as depicted in SEQ ID NO: 374, CDR-L2 as depicted in SEQ ID NO: 375, and CDR-L3 as depicted in SEQ ID NO: 376;
[0323] (39) CDR-H1 as depicted in SEQ ID NO: 381, CDR-H2 as depicted in SEQ ID NO: 382, CDR-H3 as depicted in SEQ ID NO: 383, CDR-L1 as depicted in SEQ ID NO: 384, CDR-L2 as depicted in SEQ ID NO: 385, and CDR-L3 as depicted in SEQ ID NO: 386;
[0324] (40) CDR-H1 as depicted in SEQ ID NO: 391, CDR-H2 as depicted in SEQ ID NO: 392, CDR-H3 as depicted in SEQ ID NO: 393, CDR-L1 as depicted in SEQ ID NO: 394, CDR-L2 as depicted in SEQ ID NO: 395, and CDR-L3 as depicted in SEQ ID NO: 396;
[0325] (41) CDR-H1 as depicted in SEQ ID NO: 401, CDR-H2 as depicted in SEQ ID NO: 402, CDR-H3 as depicted in SEQ ID NO: 403, CDR-L1 as depicted in SEQ ID NO: 404, CDR-L2 as depicted in SEQ ID NO: 405, and CDR-L3 as depicted in SEQ ID NO: 406;
[0326] (42) CDR-H1 as depicted in SEQ ID NO: 411, CDR-H2 as depicted in SEQ ID NO: 412, CDR-H3 as depicted in SEQ ID NO: 413, CDR-L1 as depicted in SEQ ID NO: 414, CDR-L2 as depicted in SEQ ID NO: 415, and CDR-L3 as depicted in SEQ ID NO: 416;
[0327] (43) CDR-H1 as depicted in SEQ ID NO: 421, CDR-H2 as depicted in SEQ ID NO: 422, CDR-H3 as depicted in SEQ ID NO: 423, CDR-L1 as depicted in SEQ ID NO: 424, CDR-L2 as depicted in SEQ ID NO: 425, and CDR-L3 as depicted in SEQ ID NO: 426;
[0328] (44) CDR-H1 as depicted in SEQ ID NO: 431, CDR-H2 as depicted in SEQ ID NO: 432, CDR-H3 as depicted in SEQ ID NO: 433, CDR-L1 as depicted in SEQ ID NO: 434, CDR-L2 as depicted in SEQ ID NO: 435, and CDR-L3 as depicted in SEQ ID NO: 436;
[0329] (45) CDR-H1 as depicted in SEQ ID NO: 441, CDR-H2 as depicted in SEQ ID NO: 442, CDR-H3 as depicted in SEQ ID NO: 443, CDR-L1 as depicted in SEQ ID NO: 444, CDR-L2 as depicted in SEQ ID NO: 445, and CDR-L3 as depicted in SEQ ID NO: 446;
[0330] (46) CDR-H1 as depicted in SEQ ID NO: 451, CDR-H2 as depicted in SEQ ID NO: 452, CDR-H3 as depicted in SEQ ID NO: 453, CDR-L1 as depicted in SEQ ID NO: 454, CDR-L2 as depicted in SEQ ID NO: 455, and CDR-L3 as depicted in SEQ ID NO: 456;
[0331] (47) CDR-H1 as depicted in SEQ ID NO: 461, CDR-H2 as depicted in SEQ ID NO: 462, CDR-H3 as depicted in SEQ ID NO: 463, CDR-L1 as depicted in SEQ ID NO: 464, CDR-L2 as depicted in SEQ ID NO: 465, and CDR-L3 as depicted in SEQ ID NO: 466;
[0332] (48) CDR-H1 as depicted in SEQ ID NO: 471, CDR-H2 as depicted in SEQ ID NO: 472, CDR-H3 as depicted in SEQ ID NO: 473, CDR-L1 as depicted in SEQ ID NO: 474, CDR-L2 as depicted in SEQ ID NO: 475, and CDR-L3 as depicted in SEQ ID NO: 476;
[0333] (49) CDR-H1 as depicted in SEQ ID NO: 481, CDR-H2 as depicted in SEQ ID NO: 482, CDR-H3 as depicted in SEQ ID NO: 483, CDR-L1 as depicted in SEQ ID NO: 484, CDR-L2 as depicted in SEQ ID NO: 485, and CDR-L3 as depicted in SEQ ID NO: 486;
[0334] (50) CDR-H1 as depicted in SEQ ID NO: 491, CDR-H2 as depicted in SEQ ID NO: 492, CDR-H3 as depicted in SEQ ID NO: 493, CDR-L1 as depicted in SEQ ID NO: 494, CDR-L2 as depicted in SEQ ID NO: 495, and CDR-L3 as depicted in SEQ ID NO: 496;
[0335] (51) CDR-H1 as depicted in SEQ ID NO: 501, CDR-H2 as depicted in SEQ ID NO: 502, CDR-H3 as depicted in SEQ ID NO: 503, CDR-L1 as depicted in SEQ ID NO: 504, CDR-L2 as depicted in SEQ ID NO: 505, and CDR-L3 as depicted in SEQ ID NO: 506;
[0336] (52) CDR-H1 as depicted in SEQ ID NO: 511, CDR-H2 as depicted in SEQ ID NO: 512, CDR-H3 as depicted in SEQ ID NO: 513, CDR-L1 as depicted in SEQ ID NO: 514, CDR-L2 as depicted in SEQ ID NO: 515, and CDR-L3 as depicted in SEQ ID NO: 516; and
[0337] (53) CDR-H1 as depicted in SEQ ID NO: 521, CDR-H2 as depicted in SEQ ID NO: 522, CDR-H3 as depicted in SEQ ID NO: 523, CDR-L1 as depicted in SEQ ID NO: 524, CDR-L2 as depicted in SEQ ID NO: 525, and CDR-L3 as depicted in SEQ ID NO: 526.

[0338] It is also envisaged for the antibody construct of the present invention that the first domain which binds to BCMA comprises a VL region having an amino acid sequence selected from the group consisting of those depicted in SEQ ID NOs: 8, 18, 28, 38, 48, 58, 68, 78, 88, 98, 108, 118, 128, 138, 148, 158, 168, 178, 188, 198, 208, 218, 228, 238, 248, 258, 268, 278, 288, 298, 308, 318, 328, 338, 348, 358, 368, 378, 388, 398, 408, 418, 428, 438, 448, 458, 468, 478, 488, 498, 508, 518, and 528. It is envisaged that the first domain comprises a VL region having an amino acid sequence as depicted in SEQ ID NO: 178.

[0339] It is furthermore envisaged that the first domain which binds to BCMA comprises a VH region having an amino acid sequence selected from the group consisting of those depicted in SEQ ID NOs: 7, 17, 27, 37, 47, 57, 67, 77, 87, 97, 107, 117, 127, 137, 147, 157, 167, 177, 187, 197, 207, 217, 227, 237, 247, 257, 267, 277, 287, 307, 317, 327, 337, 347, 357, 367, 377, 387, 397, 407, 417, 427, 437, 447, 457, 467, 477, 487, 497, 507, 517, and 527. It is envisaged that the first domain comprises a VH region having an amino acid sequence as depicted in SEQ ID NO: 177.

[0340] It is also envisaged for the antibody construct of the present invention that the first domain which binds to BCMA comprises a VH region and a VL region selected from the group consisting of:
[0341] (1) a VH region as depicted in SEQ ID NO: 7 and a VL region as depicted in SEQ ID NO: 8;
[0342] (2) a VH region as depicted in SEQ ID NO: 17 and a VL region as depicted in SEQ ID NO: 18;
[0343] (3) a VH region as depicted in SEQ ID NO: 27 and a VL region as depicted in SEQ ID NO: 28;
[0344] (4) a VH region as depicted in SEQ ID NO: 37 and a VL region as depicted in SEQ ID NO: 38;
[0345] (5) a VH region as depicted in SEQ ID NO: 47 and a VL region as depicted in SEQ ID NO: 48;
[0346] (6) a VH region as depicted in SEQ ID NO: 57 and a VL region as depicted in SEQ ID NO: 58;
[0347] (7) a VH region as depicted in SEQ ID NO: 67 and a VL region as depicted in SEQ ID NO: 68;
[0348] (8) a VH region as depicted in SEQ ID NO: 77 and a VL region as depicted in SEQ ID NO: 78;
[0349] (9) a VH region as depicted in SEQ ID NO: 87 and a VL region as depicted in SEQ ID NO: 88;
[0350] (10) a VH region as depicted in SEQ ID NO: 97 and a VL region as depicted in SEQ ID NO: 98;
[0351] (11) a VH region as depicted in SEQ ID NO: 107 and a VL region as depicted in SEQ ID NO: 108;
[0352] (12) a VH region as depicted in SEQ ID NO: 117 and a VL region as depicted in SEQ ID NO: 118;
[0353] (13) a VH region as depicted in SEQ ID NO: 127 and a VL region as depicted in SEQ ID NO: 128;
[0354] (14) a VH region as depicted in SEQ ID NO: 137 and a VL region as depicted in SEQ ID NO: 138;
[0355] (15) a VH region as depicted in SEQ ID NO: 147 and a VL region as depicted in SEQ ID NO: 148;
[0356] (16) a VH region as depicted in SEQ ID NO: 157 and a VL region as depicted in SEQ ID NO: 158;
[0357] (17) a VH region as depicted in SEQ ID NO: 167 and a VL region as depicted in SEQ ID NO: 168;
[0358] (18) a VH region as depicted in SEQ ID NO: 177 and a VL region as depicted in SEQ ID NO: 178;
[0359] (19) a VH region as depicted in SEQ ID NO: 187 and a VL region as depicted in SEQ ID NO: 188;
[0360] (20) a VH region as depicted in SEQ ID NO: 197 and a VL region as depicted in SEQ ID NO: 198;
[0361] (21) a VH region as depicted in SEQ ID NO: 207 and a VL region as depicted in SEQ ID NO: 208;
[0362] (22) a VH region as depicted in SEQ ID NO: 217 and a VL region as depicted in SEQ ID NO: 218;
[0363] (23) a VH region as depicted in SEQ ID NO: 227 and a VL region as depicted in SEQ ID NO: 228;
[0364] (24) a VH region as depicted in SEQ ID NO: 237 and a VL region as depicted in SEQ ID NO: 238;
[0365] (25) a VH region as depicted in SEQ ID NO: 247 and a VL region as depicted in SEQ ID NO: 248;
[0366] (26) a VH region as depicted in SEQ ID NO: 257 and a VL region as depicted in SEQ ID NO: 258;
[0367] (27) a VH region as depicted in SEQ ID NO: 267 and a VL region as depicted in SEQ ID NO: 268;
[0368] (28) a VH region as depicted in SEQ ID NO: 277 and a VL region as depicted in SEQ ID NO: 278;
[0369] (29) a VH region as depicted in SEQ ID NO: 287 and a VL region as depicted in SEQ ID NO: 288;
[0370] (30) a VH region as depicted in SEQ ID NO: 297 and a VL region as depicted in SEQ ID NO: 298;
[0371] (31) a VH region as depicted in SEQ ID NO: 307 and a VL region as depicted in SEQ ID NO: 308;
[0372] (32) a VH region as depicted in SEQ ID NO: 317 and a VL region as depicted in SEQ ID NO: 318;
[0373] (33) a VH region as depicted in SEQ ID NO: 327 and a VL region as depicted in SEQ ID NO: 328;
[0374] (34) a VH region as depicted in SEQ ID NO: 337 and a VL region as depicted in SEQ ID NO: 338;
[0375] (35) a VH region as depicted in SEQ ID NO: 347 and a VL region as depicted in SEQ ID NO: 348;
[0376] (36) a VH region as depicted in SEQ ID NO: 357 and a VL region as depicted in SEQ ID NO: 358;
[0377] (37) a VH region as depicted in SEQ ID NO: 367 and a VL region as depicted in SEQ ID NO: 368;
[0378] (38) a VH region as depicted in SEQ ID NO: 377 and a VL region as depicted in SEQ ID NO: 378;
[0379] (39) a VH region as depicted in SEQ ID NO: 387 and a VL region as depicted in SEQ ID NO: 388;
[0380] (40) a VH region as depicted in SEQ ID NO: 397 and a VL region as depicted in SEQ ID NO: 398;
[0381] (41) a VH region as depicted in SEQ ID NO: 407 and a VL region as depicted in SEQ ID NO: 408;
[0382] (42) a VH region as depicted in SEQ ID NO: 417 and a VL region as depicted in SEQ ID NO: 418;
[0383] (43) a VH region as depicted in SEQ ID NO: 427 and a VL region as depicted in SEQ ID NO: 428;
[0384] (44) a VH region as depicted in SEQ ID NO: 437 and a VL region as depicted in SEQ ID NO: 438;
[0385] (45) a VH region as depicted in SEQ ID NO: 447 and a VL region as depicted in SEQ ID NO: 448;
[0386] (46) a VH region as depicted in SEQ ID NO: 457 and a VL region as depicted in SEQ ID NO: 458;
[0387] (47) a VH region as depicted in SEQ ID NO: 467 and a VL region as depicted in SEQ ID NO: 468;
[0388] (48) a VH region as depicted in SEQ ID NO: 477 and a VL region as depicted in SEQ ID NO: 478;
[0389] (49) a VH region as depicted in SEQ ID NO: 487 and a VL region as depicted in SEQ ID NO: 488;
[0390] (50) a VH region as depicted in SEQ ID NO: 497 and a VL region as depicted in SEQ ID NO: 498;
[0391] (51) a VH region as depicted in SEQ ID NO: 507 and a VL region as depicted in SEQ ID NO: 508;
[0392] (52) a VH region as depicted in SEQ ID NO: 517 and a VL region as depicted in SEQ ID NO: 518; and
[0393] (53) a VH region as depicted in SEQ ID NO: 527 and a VL region as depicted in SEQ ID NO: 528.

[0394] It is envisaged that the first domain comprises a VH region having an amino acid sequence as depicted in SEQ ID NO: 177 and a VL region having an amino acid sequence as depicted in SEQ ID NO: 178.

[0395] It is also envisaged for the antibody construct of the present invention that the first domain which binds to BCMA comprises a polypeptide having an amino acid sequence selected from the group consisting of SEQ ID NOs: 9, 19, 29, 39, 49, 59, 69, 79, 89, 109, 129, 139, 149, 159, 169, 179, 189, 199, 209, 219, 229, 239, 249, 259, 269, 279, 289, 299, 309, 319, 329, 339, 349, 359, 369, 379, 389, 399, 409, 419, 429, 439, 449, 459, 469, 479, 489, 499, 519, and 529. It is envisaged that the first domain comprises a polypeptide having an amino acid sequence as depicted in SEQ ID NO: 179.

[0396] “T cells” or T lymphocytes are a type of lymphocyte (itself a type of white blood cell) that play a central role in cell-mediated immunity. There are several subsets of T cells, each with a distinct function. T cells can be distinguished from other lymphocytes, such as B cells and NK cells, by the presence of a T cell receptor (TCR) on the cell surface. The TCR is responsible for recognizing antigens bound to major histocompatibility complex (MHC) molecules and is composed of two different protein chains. In 95% of the T cells, the TCR consists of an alpha (a) and beta (0) chain. When the TCR engages with antigenic peptide and MHC (peptide/MHC complex), the T lymphocyte is activated through a series of biochemical events mediated by associated enzymes, co-receptors, specialized adaptor molecules, and activated or released transcription factors.

[0397] “CD3” (cluster of differentiation 3) is a T cell co-receptor composed of four chains. In mammals, the CD3 protein complex contains a CD3γ (gamma) chain, a CD3δ (delta) chain, and two CD3ε (epsilon) chains. These four chains associate with the T cell receptor (TCR) and the so-called ((zeta) chain to for the “T cell receptor complex” and to generate an activation signal in T lymphocytes. The CD3γ (gamma), CD3δ (delta), and CD3ε (epsilon) chains are highly related cell-surface proteins of the immunoglobulin superfamily and each contain a single extracellular immunoglobulin domain. The intracellular tails of the CD3 molecules contain a single conserved motif known as an immunoreceptor tyrosine-based activation motif (ITAM), which is essential for the signaling capacity of the TCR. The CD3 epsilon molecule is a polypeptide which in humans is encoded by the CD3E gene which resides on chromosome 11.

[0398] The redirected lysis of target cells via the recruitment of T cells by an antibody construct which binds to CD3 on the T cell and to a target protein on the target cell generally involves cytolytic synapse formation and delivery of perforin and granzymes. The engaged T cells are capable of serial target cell lysis, and are not affected by immune escape mechanisms interfering with peptide antigen processing and presentation, or clonal T cell differentiation; see, for example, WO 2007/042261.

[0399] Cytotoxicity mediated by BCMAxCD3 antibody constructs can be measured in various ways. The “half maximal effective concentration” (EC₅₀) is commonly used as a measure of potency of a biologically active molecule such as an antibody construct of the present invention. It is expressed in molar units. In the present case of measuring cytotoxicity, the EC₅₀ value refers to the concentration of an antibody construct inducing a cytotoxic response (lysis of target cells) halfway between the baseline and the maximum. Effector cells in a cytotoxicity assay can e.g. be stimulated enriched (human) CD8 positive T cells or unstimulated (human) peripheral blood mononuclear cells (PBMC). The target cells should express BCMA on the cell surface. Preferably the target cells express (at least) the extracellular domain of BCMA on the cell surface. Target cells can be a cell line (such as CHO) which is stably or transiently transfected with BCMA, e.g. human BCMA. Alternatively, the target cells can be a BCMA positive natural expresser cell line, such as the human multiple myeloma cell line L363 or NCI-H929.

[0400] The effector to target cell (E:T) ratio in a cytotoxicity assay is usually about 10:1, but can also vary. Cytotoxic activity of BCMAxCD3 antibody constructs can be measured in a 51-chromium release assay (e.g. with an incubation time of about 18 hours) or in a in a FACS-based cytotoxicity assay (e.g. with an incubation time of about 48 hours). Modifications of the incubation time (cytotoxic reaction) are also envisaged. Other methods of measuring cytotoxicity are well-known and comprise MTT or MTS assays, ATP-based assays including bioluminescent assays, the sulforhodamine B (SRB) assay, WST assay, clonogenic assay and the ECIS technology.

[0401] According to one embodiment, the cytotoxic activity mediated by BCMAxCD3 antibody constructs of the present invention is measured in a FACS-based cytotoxicity assay. It is envisaged that the EC₅₀ value of the BCMAxCD3 antibody constructs is ≤5000 pM or ≤4000 pM, more preferably ≤3000 pM or ≤2000 pM, even more preferably ≤1000 pM or ≤500 pM, even more preferably ≤400 pM or ≤300 pM, even more preferably ≤200 pM, even more preferably ≤100 pM, even more preferably ≤50 pM, even more preferably ≤20 pM or ≤10 pM, and most preferably ≤5 pM. It is also envisaged that the antibody construct of the present invention has an EC50 value in the 3-digit, 2-digit or 1-digit pg/ml range, as determined in a FACS-based cytotoxicity assay. The assay may be carried out with the L363 or NCI-H929 cell line or with BCMA transfected CHO cells as target cells and stimulated enriched (human) CD8 positive T cells or unstimulated (human) PBMC as effector cells. See also WO 2013/072406.

[0402] The second domain of the antibody construct of the invention binds to CD3. More preferably, it binds to CD3 on the surface of a T cell. It is furthermore envisaged that the second domain binds to human CD3, preferably to human CD3 on the surface of a T cell. It is also envisaged that the second domain binds to CD3 epsilon. More preferably, it binds to human CD3 epsilon, e.g. to human CD3 epsilon on the surface of a T cell. A preferred amino acid sequence for the extracellular domain of human CD3 epsilon is depicted in SEQ ID NO: 653.

[0403] In one embodiment of the present invention, the second domain of the antibody construct binds to human CD3 epsilon (or human CD3 epsilon on the surface of a T cell) and to Callithrix jacchus or Saimiri sciureus CD3 epsilon. It is also envisaged that the second domain binds to an extracellular epitope of CD3 epsilon, preferably to an extracellular epitope of human CD3 epsilon. It is also envisaged that the second domain binds to an extracellular epitope of the human and the Macaca CD3 epsilon chain. One preferred epitope of CD3 epsilon is comprised within amino acid residues 1-27 of the human CD3 epsilon extracellular domain (see SEQ ID NO: 654). Even more specifically, the epitope comprises at least the amino acid sequence Gln-Asp-Gly-Asn-Glu. Callithrix jacchus is a new world primate belonging to the family of Callitrichidae, while Saimiri sciureus is a new world primate belonging to the family of Cebidae. Binders having such characteristics are described in detail in WO 2008/119567.

[0404] Antibodies or bispecific antibody constructs directed against (human) CD3 or specifically against CD3 epsilon are known in the art, and their CDRs, VH and VL sequences can serve as a basis for the second binding domain of the antibody construct of the invention. For example, Kung et al. reported in 1979 the development of OKT3 (Ortho Kung T3), the first mAb recognizing CD3 (specifically, the epsilon chain of CD3) on human T cells. OKT3 (muromonab) was the first monoclonal antibody of murine origin to become available for therapy in humans. Newer anti-CD3 monoclonal antibodies include otelixizumab (TRX4), teplizumab (MGA031), foralumab and visilizumab, all targeting the epsilon chain of CD3. Bispecific antibody constructs directed against a (cancer) target and CD3 are also being developed and (pre-)clinically tested, and their CD3 binding domain (CDRs, VH, VL) may serve as a basis for the second binding domain of the antibody construct of the invention. Examples include, but are not limited to, Blinatumomab, Solitomab (MT110, AMG 110), Catumaxomab, Duvortuxizumab, Ertumaxomab, Mosunetuzumab, FBTA05 (Bi20, TPBs05), CEA-TCB (RG7802, R06958688), AFM11, and MGD006 (S80880). Other examples of CD3 binding domains are disclosed e.g. in U.S. Pat. No. 7,994,289 B2, U.S. Pat. No. 7,728,114 B2, U.S. Pat. No. 7,381,803 B1, U.S. Pat. No. 6,706,265 B1.

[0405] It is envisaged for the antibody construct of the present invention that the second domain which binds to CD3 comprises a VL region comprising CDR-L1, CDR-L2 and CDR-L3 selected from:
[0406] (a) CDR-L1 as depicted in SEQ ID NO: 542, CDR-L2 as depicted in SEQ ID NO: 543, and CDR-L3 as depicted in SEQ ID NO: 544;
[0407] (b) CDR-L1 as depicted in SEQ ID NO: 599, CDR-L2 as depicted in SEQ ID NO: 600, and CDR-L3 as depicted in SEQ ID NO: 601; and
[0408] (c) CDR-L1 as depicted in SEQ ID NO: 621, CDR-L2 as depicted in SEQ ID NO: 622, and CDR-L3 as depicted in SEQ ID NO: 623.

[0409] It is also envisaged for the antibody construct of the present invention that the second domain which binds to CD3 comprises a VH region comprising CDR-H1, CDR-H2 and CDR-H3 selected from:
[0410] (a) CDR-H1 as depicted in SEQ ID NO: 534, CDR-H2 as depicted in SEQ ID NO: 535, and CDR-H3 as depicted in SEQ ID NO: 536;
[0411] (b) CDR-H1 as depicted in SEQ ID NO: 545, CDR-H2 as depicted in SEQ ID NO: 546, and CDR-H3 as depicted in SEQ ID NO: 547;
[0412] (c) CDR-H1 as depicted in SEQ ID NO: 557, CDR-H2 as depicted in SEQ ID NO: 558, and CDR-H3 as depicted in SEQ ID NO: 559;
[0413] (d) CDR-H1 as depicted in SEQ ID NO: 568, CDR-H2 as depicted in SEQ ID NO: 569, and CDR-H3 as depicted in SEQ ID NO: 570;
[0414] (e) CDR-H1 as depicted in SEQ ID NO: 579, CDR-H2 as depicted in SEQ ID NO: 580, and CDR-H3 as depicted in SEQ ID NO: 581;
[0415] (f) CDR-H1 as depicted in SEQ ID NO: 591, CDR-H2 as depicted in SEQ ID NO: 592, and CDR-H3 as depicted in SEQ ID NO: 593;
[0416] (g) CDR-H1 as depicted in SEQ ID NO: 602, CDR-H2 as depicted in SEQ ID NO: 603, and CDR-H3 as depicted in SEQ ID NO: 604;
[0417] (h) CDR-H1 as depicted in SEQ ID NO: 613, CDR-H2 as depicted in SEQ ID NO: 614, and CDR-H3 as depicted in SEQ ID NO: 615;
[0418] (i) CDR-H1 as depicted in SEQ ID NO: 624, CDR-H2 as depicted in SEQ ID NO: 625, and CDR-H3 as depicted in SEQ ID NO: 626; and
[0419] (j) CDR-H1 as depicted in SEQ ID NO: 636, CDR-H2 as depicted in SEQ ID NO: 637, and CDR-H3 as depicted in SEQ ID NO: 638.

[0420] It is furthermore envisaged for the antibody construct of the present invention that the second domain which binds to CD3 comprises a VL region comprising CDR-L1, CDR-L2 and CDR-L3 and a VH region comprising CDR-H1, CDR-H2 and CDR-H3 selected from:
[0421] (a) CDR-L1 as depicted in SEQ ID NO: 531, CDR-L2 as depicted in SEQ ID NO: 532, CDR-L3 as depicted in SEQ ID NO: 533, CDR-H1 as depicted in SEQ ID NO: 534, CDR-H2 as depicted in SEQ ID NO: 535, and CDR-H3 as depicted in SEQ ID NO: 536;
[0422] (b) CDR-L1 as depicted in SEQ ID NO: 542, CDR-L2 as depicted in SEQ ID NO: 543, CDR-L3 as depicted in SEQ ID NO: 544, CDR-H1 as depicted in SEQ ID NO: 545, CDR-H2 as depicted in SEQ ID NO: 546, and CDR-H3 as depicted in SEQ ID NO: 547;
[0423] (c) CDR-L1 as depicted in SEQ ID NO: 554, CDR-L2 as depicted in SEQ ID NO: 555, CDR-L3 as depicted in SEQ ID NO: 556, CDR-H1 as depicted in SEQ ID NO: 557, CDR-H2 as depicted in SEQ ID NO: 558, and CDR-H3 as depicted in SEQ ID NO: 559;
[0424] (d) CDR-L1 as depicted in SEQ ID NO: 565, CDR-L2 as depicted in SEQ ID NO: 566, CDR-L3 as depicted in SEQ ID NO: 567, CDR-H1 as depicted in SEQ ID NO: 568, CDR-H2 as depicted in SEQ ID NO: 569, and CDR-H3 as depicted in SEQ ID NO: 570;
[0425] (e) CDR-L1 as depicted in SEQ ID NO: 576, CDR-L2 as depicted in SEQ ID NO: 577, CDR-L3 as depicted in SEQ ID NO: 578, CDR-H1 as depicted in SEQ ID NO: 579, CDR-H2 as depicted in SEQ ID NO: 580, and CDR-H3 as depicted in SEQ ID NO: 581;
[0426] (f) CDR-L1 as depicted in SEQ ID NO: 588, CDR-L2 as depicted in SEQ ID NO: 589, CDR-L3 as depicted in SEQ ID NO: 590, CDR-H1 as depicted in SEQ ID NO: 591, CDR-H2 as depicted in SEQ ID NO: 592, and CDR-H3 as depicted in SEQ ID NO: 593;
[0427] (g) CDR-L1 as depicted in SEQ ID NO: 599, CDR-L2 as depicted in SEQ ID NO: 600, CDR-L3 as depicted in SEQ ID NO: 601, CDR-H1 as depicted in SEQ ID NO: 602, CDR-H2 as depicted in SEQ ID NO: 603, and CDR-H3 as depicted in SEQ ID NO: 604;
[0428] (h) CDR-L1 as depicted in SEQ ID NO: 610, CDR-L2 as depicted in SEQ ID NO: 611, CDR-L3 as depicted in SEQ ID NO: 612, CDR-H1 as depicted in SEQ ID NO: 613, CDR-H2 as depicted in SEQ ID NO: 614, and CDR-H3 as depicted in SEQ ID NO: 615;
[0429] (i) CDR-L1 as depicted in SEQ ID NO: 621, CDR-L2 as depicted in SEQ ID NO: 622, CDR-L3 as depicted in SEQ ID NO: 623, CDR-H1 as depicted in SEQ ID NO: 624, CDR-H2 as depicted in SEQ ID NO: 625, and CDR-H3 as depicted in SEQ ID NO: 626; and
[0430] (j) CDR-L1 as depicted in SEQ ID NO: 633, CDR-L2 as depicted in SEQ ID NO: 634, CDR-L3 as depicted in SEQ ID NO: 635, CDR-H1 as depicted in SEQ ID NO: 636, CDR-H2 as depicted in SEQ ID NO: 637, and CDR-H3 as depicted in SEQ ID NO: 638.

[0431] It is also envisaged for the antibody construct of the present invention that the second domain which binds to CD3 comprises a VL region having an amino acid sequence selected from the group consisting of those depicted in SEQ ID NO: 550, SEQ ID NO: 551, SEQ ID NO: 584, SEQ ID NO: 585, SEQ ID NO: 629 and SEQ ID NO: 630, preferably SEQ ID NO: 629.

[0432] It is furthermore envisaged that the second domain which binds to CD3 comprises a VH region having an amino acid sequence selected from the group consisting of those depicted in SEQ ID NO: 537, SEQ ID NO: 538, SEQ ID NO: 548, SEQ ID NO: 549, SEQ ID NO: 560, SEQ ID NO: 561, SEQ ID NO: 571, SEQ ID NO: 572, SEQ ID NO: 582, SEQ ID NO: 583, SEQ ID NO: 594, SEQ ID NO: 595, SEQ ID NO: 605, SEQ ID NO: 606, SEQ ID NO: 616, SEQ ID NO: 617, SEQ ID NO: 627, SEQ ID NO: 628, SEQ ID NO: 639, SEQ ID NO: 640, and SEQ ID NO: 644.

[0433] It is also envisaged for the antibody construct of the present invention that the second domain which binds to CD3 comprises a VL region and a VH region selected from the group consisting of:
[0434] (a) a VL region as depicted in SEQ ID NO: 539 or 521 and a VH region as depicted in SEQ ID NO: 537 or 538;
[0435] (b) a VL region as depicted in SEQ ID NO: 550 or 521 and a VH region as depicted in SEQ ID NO: 548 or 549;
[0436] (c) a VL region as depicted in SEQ ID NO: 562 or 521 and a VH region as depicted in SEQ ID NO: 560 or 561;
[0437] (d) a VL region as depicted in SEQ ID NO: 573 or 521 and a VH region as depicted in SEQ ID NO: 571 or 572;
[0438] (e) a VL region as depicted in SEQ ID NO: 584 or 585 and a VH region as depicted in SEQ ID NO: 582 or 583;
[0439] (f) a VL region as depicted in SEQ ID NO: 596 or 521 and a VH region as depicted in SEQ ID NO: 594 or 595;
[0440] (g) a VL region as depicted in SEQ ID NO: 607 or 585 and a VH region as depicted in SEQ ID NO: 605 or 606;
[0441] (h) a VL region as depicted in SEQ ID NO: 618 or 521 and a VH region as depicted in SEQ ID NO: 616 or 617;
[0442] (i) a VL region as depicted in SEQ ID NO: 629 or 630 and a VH region as depicted in SEQ ID NO: 627 or 628;
[0443] (j) a VL region as depicted in SEQ ID NO: 641 or 630 and a VH region as depicted in SEQ ID NO: 639 or 640; and
[0444] (k) a VL region as depicted in SEQ ID NO: 645 and a VH region as depicted in SEQ ID NO: 644.

[0445] It is also envisaged for the antibody construct of the present invention that the second domain which binds to CD3 comprises or consists of a polypeptide having an amino acid sequence selected from the group consisting of those depicted in SEQ ID NOs: 540, 541, 552, 553, 563, 564, 574, 575, 586, 587, 597, 598, 608, 609, 619, 620, 631, 632, 642, 643, and 646, preferably SEQ ID NO: 642.

[0446] It is also envisaged that the antibody construct of the present invention competes for binding to CD3 with:
[0447] a) an antibody or antibody construct comprising a domain which binds to CD3 on the surface of a T cell, wherein said domain comprises a VH region comprising CDR-H1 as depicted in SEQ ID NO: 636, CDR-H2 as depicted in SEQ ID NO: 637, and CDR-H3 as depicted in SEQ ID NO: 638, and a VL region comprising CDR-L1 as depicted in SEQ ID NO: 633, CDR-L2 as depicted in SEQ ID NO: 634, CDR-L3 as depicted in SEQ ID NO: 635;
[0448] b) an antibody or antibody construct comprising a domain which binds to CD3 on the surface of a T cell, wherein said domain comprises a VH region as depicted in SEQ ID NO: 639, and a VL region as depicted in SEQ ID NO: 641;
[0449] c) an antibody construct comprising a domain which binds to CD3 on the surface of a T cell, wherein said domain comprises the amino acid sequence as depicted in SEQ ID NO: 642; or
[0450] d) an antibody construct having the amino acid sequence as depicted in SEQ ID NO: 661.

[0451] It is also envisaged that the antibody construct of the present invention binds to the same epitope of CD3 as:
[0452] a) an antibody or antibody construct comprising a domain which binds to CD3 on the surface of a T cell, wherein said domain comprises a VH region comprising CDR-H1 as depicted in SEQ ID NO: 636, CDR-H2 as depicted in SEQ ID NO: 637, and CDR-H3 as depicted in SEQ ID NO: 638, and a VL region comprising CDR-L1 as depicted in SEQ ID NO: 633, CDR-L2 as depicted in SEQ ID NO: 634, CDR-L3 as depicted in SEQ ID NO: 635;
[0453] b) an antibody or antibody construct comprising a domain which binds to CD3 on the surface of a T cell, wherein said domain comprises a VH region as depicted in SEQ ID NO: 639, and a VL region as depicted in SEQ ID NO: 641;
[0454] c) an antibody construct comprising a domain which binds to CD3 on the surface of a T cell, wherein said domain comprises the amino acid sequence as depicted in SEQ ID NO: 642; or
[0455] d) an antibody construct having the amino acid sequence as depicted in SEQ ID NO: 661.

[0456] It is furthermore envisaged that the antibody construct of the present invention comprises a polypeptide having an amino acid sequence selected from the group consisting of those depicted in SEQ ID NOs: 10, 20, 30, 40, 50, 60, 70, 80, 90, 100, 110, 120, 130, 140, 150, 160, 170, 180, 190, 200, 210, 220, 230, 240, 250, 260, 270, 280, 290, 300, 310, 320, 330, 340, 350, 360, 370, 380, 390, 400, 410, 420, 430, 440, 450, 460, 470, 480, 490, 500, 510, 520, and 530. It is envisaged that the antibody construct of the present invention comprises a polypeptide having an amino acid sequence as depicted in SEQ ID NO: 180.

[0457] It is also envisaged that the antibody construct of the present invention comprises or consists of a polypeptide which has an amino acid sequence selected from the group consisting of those depicted in SEQ ID NOs: 10, 20, 30, 40, 50, 60, 70, 80, 90, 100, 110, 120, 130, 140, 150, 160, 170, 180, 190, 200, 210, 220, 230, 240, 250, 260, 270, 280, 290, 300, 310, 320, 330, 340, 350, 360, 370, 380, 390, 400, 410, 420, 430, 440, 450, 460, 470, 480, 490, 500, 510, 520, and 530, and which is linked at its N-terminus or at its C-terminus with a protein purification tag, preferably via a peptide bond (amide bond). The linking of the protein purification tag at the C-terminus of the polypeptide is preferred. It is envisaged that the protein purification tag is a short peptide. For example, the length of the short peptide may be 2-30 amino acids, 4-25 amino acids, 5-20 amino acids or 6-19 amino acids. Examples of protein purification tags include, but are not limited to, AU1 epitope (e.g. as depicted in SEQ ID NO: 666), AU5 epitope (e.g. as depicted in SEQ ID NO: 667), T7-tag (e.g. as depicted in SEQ ID NO: 668), V5-tag (e.g. as depicted in SEQ ID NO: 669), B-tag (e.g. as depicted in SEQ ID NO: 670), E2 epitope (e.g. as depicted in SEQ ID NO: 671), FLAG epitope/FLAG tag (e.g. as depicted in SEQ ID NO: 672), Glu-Glu tag (e.g. as depicted in SEQ ID NOs: 673 or 674), HA tag, Histidine affinity tag (e.g. as depicted in SEQ ID NO: 675), HSV epitope (e.g. as depicted in SEQ ID NO: 676), KT3 epitope (e.g. as depicted in SEQ ID NO: 677), Myc epitope (e.g. as depicted in SEQ ID NO: 678), polyarginine tag (5-6 Arg residues), polyaspartate tag (5-16 Asp residues), polyhistidine tag (2-10 His residues, usually 6 His residues, see e.g. SEQ ID NOs: 662-665), polyphenylalanine tag (usually 11 Phe residues), S1 tag (e.g. as depicted in SEQ ID NO: 679), S-tag (e.g. as depicted in SEQ ID NO: 680), Strep-tag (e.g. as depicted in SEQ ID NOs: 681 or 682), universal tag (e.g. as depicted in SEQ ID NO: 683), VSV-G (e.g. as depicted in SEQ ID NO: 684), Protein C (e.g. as depicted in SEQ ID NO: 685), and Protein A. A histidine tag is preferred, especially a 6×His tag (SEQ ID NO: 663).

[0458] It is also envisaged that the antibody construct of the present invention binds to the same epitope of BCMA as:
[0459] a) an antibody or antibody construct comprising a domain which binds to BCMA on the surface of a target cell, wherein said domain comprises a VH region comprising CDR-H1 as depicted in SEQ ID NO: 171, CDR-H2 as depicted in SEQ ID NO: 172, and CDR-H3 as depicted in SEQ ID NO: 173, and a VL region comprising CDR-L1 as depicted in SEQ ID NO: 174, CDR-L2 as depicted in SEQ ID NO: 175, and CDR-L3 as depicted in SEQ ID NO: 176;
[0460] b) an antibody or antibody construct comprising a domain which binds to BCMA on the surface of a target cell, wherein said domain comprises a VH region as depicted in SEQ ID NO: 177, and a VL region as depicted in SEQ ID NO: 178;
[0461] c) an antibody construct comprising a domain which binds to BCMA on the surface of a target cell, wherein said domain comprises the amino acid sequence as depicted in SEQ ID NO: 179; or
[0462] d) an antibody construct having the amino acid sequence as depicted in SEQ ID NO: 661.

[0463] Whether or not an antibody, antibody construct or binding domain binds to the same epitope of BCMA/BCMA on the surface of a target cell as another given antibody, antibody construct or binding domain can be measured by different analyses, e.g. by epitope mapping with chimeric or mutated BCMA molecules, as described in WO 2013/072406. Another possibility to identify the epitope within a target is an Alanine scanning assay (see e.g. Morrison K L & Weiss G A. Curr Opin Chem Biol. 2001 June; 5(3):302-7), where each residue within the target (here: BCMA) to be analyzed is replaced by alanine, e.g. via site-directed mutagenesis. Alanine is used because of its non-bulky, chemically inert, methyl functional group that nevertheless mimics the secondary structure references that many of the other amino acids possess. Sometimes bulky amino acids such as valine or leucine can be used in cases where conservation of the size of mutated residues is desired. Alanine scanning is usually accomplished by site-directed mutagenesis or randomly by creating a PCR library. Furthermore, computational methods to estimate thermodynamic parameters based on theoretical alanine substitutions have been developed. The data can be tested by IR, NMR Spectroscopy, mathematical methods, bioassays, etc. The same analysis can of course be applied for other targets such as CD3.

[0464] It is also envisaged that the antibody construct of the present invention competes for binding to BCMA with:
[0465] a) an antibody or antibody construct comprising a domain which binds to BCMA on the surface of a target cell, wherein said domain comprises a VH region comprising CDR-H1 as depicted in SEQ ID NO: 171, CDR-H2 as depicted in SEQ ID NO: 172, and CDR-H3 as depicted in SEQ ID NO: 173, and a VL region comprising CDR-L1 as depicted in SEQ ID NO: 174, CDR-L2 as depicted in SEQ ID NO: 175, and CDR-L3 as depicted in SEQ ID NO: 176;
[0466] b) an antibody or antibody construct comprising a domain which binds to BCMA on the surface of a target cell, wherein said domain comprises a VH region as depicted in SEQ ID NO: 177, and a VL region as depicted in SEQ ID NO: 178;
[0467] c) an antibody construct comprising a domain which binds to BCMA on the surface of a target cell, wherein said domain comprises the amino acid sequence as depicted in SEQ ID NO: 179; or
[0468] d) an antibody construct having the amino acid sequence as depicted in SEQ ID NO: 661.

[0469] Whether or not an antibody or antibody construct competes for binding to BCMA/BCMA on the surface of a target cell with another given antibody or antibody construct can be measured in a competition assay such as a competitive ELISA or a cell-based competition assay (using either cells that naturally express BCMA or cells that were stably or transiently transformed with BCMA). Avidin-coupled microparticles (beads) can also be used. Similar to an avidin-coated ELISA plate, when reacted with a biotinylated protein, each of these beads can be used as a substrate on which an assay can be performed. Antigen is coated onto a bead and then precoated with the first antibody. The second antibody is added, and any additional binding is determined. Read-out occurs via flow cytometry. The term “competes for binding”, in the present context, means that competition occurs between the two tested antibodies of at least 20%, at least 30%, at least 40%, at least 50%, at least 60%, at least 70%, at least 80% or at least 90%, as determined by any one of the assays disclosed above. The same analysis can of course be applied for other targets such as CD3.

[0470] The antibody construct described herein comprises a third domain which extends or enhances the half-life (or “serum half-life”) of the antibody construct. Examples for means or domains to extend serum half-life of the antibody constructs of the invention include peptides, proteins or domains of proteins, which are fused or otherwise attached to the antibody constructs. The group of peptides, proteins or protein domains includes peptides binding to other proteins with preferred pharmacokinetic profile in the human body such as serum albumin (see WO 2009/127691). An alternative concept of such half-life extending peptides includes peptides binding to the neonatal Fc receptor (FcRn, see WO 2007/098420), which can also be used for the antibody constructs of the present invention. The concept of attaching larger domains of proteins or complete proteins includes the fusion of human serum albumin, variants or mutants of human serum albumin (see WO 2011/051489, WO 2012/059486, WO 2012/150319, WO 2013/135896, WO 2014/072481, WO 2013/075066) or domains thereof, as well as the fusion of an immunoglobulin constant region (Fc domain) and variants thereof. Such variants of Fc domains are called Fc-based domains and may be further optimized/modified in order to allow the desired pairing of dimers or multimers, to abolish Fc receptor binding (e.g. to avoid ADCC or CDC) or for other reasons. A further concept known in the art to extend the half-life of substances or molecules in the human body is the pegylation of those molecules (such as the antibody constructs of the present invention).

[0471] In one embodiment, the antibody constructs according to the invention are linked (e.g. via peptide bond) with a fusion partner (such as a protein, polypeptide or peptide) for the purpose of extending the construct's serum half-life. These fusion partners (representing the “third domain”) can be selected from human serum albumin (“HSA” or “HALB”) as wells as sequence variants thereof, peptides binding to HSA, peptides binding to FcRn (“FcRn BP”), or constructs comprising an (antibody derived) Fc region. In general, the fusion partners may be linked to the N-terminus or to the C-terminus of the antibody constructs according to the invention, either directly (e.g. via peptide bond) or through a peptide linker such as (GGGGS)n (wherein “n” is an integer of 2 or greater, e.g. 2 or 3 or 4). Suitable peptide linkers are depicted in SEQ ID NOs: 686-694.

[0472] According to a further embodiment, the third domain of the antibody construct of the invention comprises two polypeptide monomers, each comprising a hinge, a CH2 domain and a CH3 domain, wherein said two polypeptide monomers are fused to each other via a peptide linker. It is envisaged that said third domain comprises in an N-terminal to C-terminal order: “first polypeptide monomer—linker—second polypeptide monomer” or hinge-CH2-CH3-linker-hinge-CH2-CH3. Amino acid sequences that can be used for said third domain are depicted in SEQ ID NOs: 700-707. Each of said polypeptide monomers can have an amino acid sequence that is selected from the group consisting of SEQ ID NOs: 708-715, or that is at least 90% identical to those sequences. In another embodiment, the first and second domains of the antibody construct of the invention are fused to the third domain via a peptide linker which is for example selected from the group consisting of SEQ ID NO: 686, 687, 688, 689, 690, 691, 692, 693 or 694.

[0473] In line with the present invention, a “hinge” is an IgG hinge region. This region can be identified by analogy using the Kabat numbering, see e.g. Kabat positions 223-243. In line with the above, the minimal requirement for a “hinge” are the amino acid residues corresponding to the IgG₁ sequence stretch of D231 to P243 according to the Kabat numbering. The terms “CH2” and “CH3” (or “CH2 domain” and “CH3 domain”) refer to the immunoglobulin heavy chain constant regions 2 and 3. These regions can as well be identified by analogy using the Kabat numbering, see e.g. Kabat positions 244-360 for CH2 and Kabat positions 361-478 for CH3. It is understood that there is some variation between the immunoglobulins in terms of their IgG₁ Fc region, IgG₂ Fc region, IgG₃ Fc region, IgG₄ Fc region, IgM Fc region, IgA Fc region, IgD Fc region and IgE Fc region (see, e.g., Padlan, Molecular Immunology, 31(3), 169-217 (1993)). The term Fc region refers to the last two heavy chain constant regions of IgA, IgD, and IgG, and the last three heavy chain constant regions of IgE and IgM. The Fc region can also include the flexible hinge N-terminal to these domains. For IgA and IgM, the Fc region may include the J chain. For IgG, the Fc region comprises immunoglobulin domains CH2 and CH3 and the hinge between the first two domains and CH2. Although the boundaries of the Fc region of an immunoglobulin may vary, an example for a human IgG heavy chain Fc portion comprising a functional hinge, CH2 domain and CH3 domain can be defined e.g. to comprise residues D231 (of the hinge domain) to P476 (of the C-terminus of the CH3 domain), or D231 to L476, respectively, for IgG₄, wherein the numbering is according to Kabat.

[0474] The antibody construct of the invention may hence comprise in an N- to C-terminal order:
[0475] (a) the first domain;
[0476] (b) a peptide linker having an amino acid sequence selected from the group consisting of SEQ ID NOs: 687, 693 and 694;
[0477] (c) the second domain;
[0478] (d) a peptide linker having an amino acid sequence selected from the group consisting of SEQ ID NO: 686, 687, 688, 689, 690, 691, 692, 693 or 694;
[0479] (e) the first polypeptide monomer of the third domain (comprising a hinge, a CH2 domain and a CH3 domain);
[0480] (f) a peptide linker having an amino acid sequence selected from the group consisting of SEQ ID NOs: 695, 696, 697, 698 or 699; and
[0481] (g) the second polypeptide monomer of the third domain (comprising a hinge, a CH2 domain and a CH3 domain).

[0482] It is also envisaged that the antibody construct of the invention comprises in an N- to C-terminal order:
[0483] (f) the first domain having an amino acid sequence selected from the group consisting of SEQ ID NOs: 9, 19, 29, 39, 49, 59, 69, 79, 89, 109, 129, 139, 149, 159, 169, 179, 189, 199, 209, 219, 229, 239, 249, 259, 269, 279, 289, 299, 309, 319, 329, 339, 349, 359, 369, 379, 389, 399, 409, 419, 429, 439, 449, 459, 469, 479, 489, 499, 519, and 529; wherein the peptide linker comprised within those sequences and having SEQ ID NO: 694 can be replaced by any one of SEQ ID NOs: 686-693 and 695-699;
[0484] (g) a peptide linker having an amino acid sequence selected from the group consisting of SEQ ID NOs: 687, 693 and 694;
[0485] (h) the second domain having an amino acid sequence selected from the group consisting of SEQ ID NOs: 540, 541, 552, 553, 563, 564, 574, 575, 586, 587, 597, 598, 608, 609, 619, 620, 631, 632, 642, 643, and 646; wherein the peptide linker comprised within those sequences and having SEQ ID NO: 694 can be replaced by any one of SEQ ID NOs: 686-693 and 695-699;
[0486] (i) a peptide linker having an amino acid sequence selected from the group consisting of SEQ ID NOs: 686, 687, 688, 689, 690, 691, 692, 693, and 694; and
[0487] (j) the third domain having an amino acid sequence selected from the group consisting of SEQ ID NOs: 700-707.

[0488] Hence, in one embodiment, the antibody construct of the present invention comprises in an N- to C-terminal order:
[0489] (a) a polypeptide having an amino acid sequence selected from the group consisting of those depicted in SEQ ID NOs: 10, 20, 30, 40, 50, 60, 70, 80, 90, 100, 110, 120, 130, 140, 150, 160, 170, 180, 190, 200, 210, 220, 230, 240, 250, 260, 270, 280, 290, 300, 310, 320, 330, 340, 350, 360, 370, 380, 390, 400, 410, 420, 430, 440, 450, 460, 470, 480, 490, 500, 510, 520, and 530;
[0490] (b) a linker having an amino acid sequence as depicted in SEQ ID NO: 686; and
[0491] (c) the third domain having an amino acid sequence as depicted in SEQ ID NO: 700.

[0492] A preferred antibody construct of the present invention comprises or consists of a polypeptide having the amino acid sequence as depicted in SEQ ID NO: 661.

[0493] The antibody construct of the present invention, or one or both of its binding domains, may be “humanized” or “human”. “Humanized” antibodies, variants or fragments thereof, antibody constructs and binding domains are based on immunoglobulins of mostly human sequences, which contain (a) minimal sequence(s) derived from non-human immunoglobulin. For the most part, humanized antibodies, variants or fragments thereof, antibody constructs and binding domains are based on human immunoglobulins (recipient antibodies) in which residues from a hypervariable region or CDR are replaced by residues from a hypervariable region or CDR of a non-human species (donor antibody) such as a rodent (e.g. mouse, hamster, rat or rabbit) having the desired specificity, affinity, capacity and/or biological activity. In some instances, Fv framework region (FR) residues of the human immunoglobulin are replaced by corresponding non-human residues. Furthermore, “humanized” antibodies, variants or fragments thereof, antibody constructs and binding domains as used herein may also comprise residues which are found neither in the recipient antibody nor the donor antibody. These modifications are made to further refine and optimize antibody performance. The humanized antibodies, variants or fragments thereof, antibody constructs and binding domains may also comprise at least a portion of an immunoglobulin constant region (such as Fc), typically that of a human immunoglobulin. For further details, see Jones et al., Nature, 321: 522-525 (1986); Reichmann et al., Nature, 332: 323-329 (1988); and Presta, Curr. Op. Struct. Biol., 2: 593-596 (1992).

[0494] Human anti-mouse antibody (HAMA) responses have led the industry to prepare chimeric or otherwise humanized antibodies/antibody constructs. It is however expected that certain human anti-chimeric antibody (HACA) responses will be observed, particularly in chronic or multi-dose utilizations of an antibody or antibody construct. Thus, it would be desirable to provide antibody constructs comprising a human binding domain against BCMA and/or a human binding domain against CD3, in order to vitiate concerns and/or effects of HAMA or HACA response.

[0495] Therefore, according to one embodiment, the antibody construct, the first binding domain and/or the second binding domain are “human”. The term “human antibody”, “human antibody construct” and “human binding domain” includes antibodies, antibody constructs and binding domains, respectively, having antibody-derived regions such as variable and constant regions or domains which correspond substantially to human germline immunoglobulin sequences known in the art, including, for example, those described by Kabat et al. (1991) (loc. cit.). The human antibody constructs or binding domains of the invention may include amino acid residues not encoded by human germline immunoglobulin sequences (e.g., mutations introduced by random or site-specific mutagenesis in vitro or by somatic mutation in vivo), for example in the CDRs, and in particular in CDR3. The human antibody constructs or binding domains can have at least one, two, three, four, five, or more positions replaced with an amino acid residue that is not encoded by the human germline immunoglobulin sequence. The definition of human antibodies, antibody constructs and binding domains as used herein also contemplates fully human antibodies, antibody constructs and binding domains which include only non-artificially and/or genetically altered human sequences of antibodies as those can be derived by using technologies or systems such as the Xenomouse.

[0496] Antibody constructs comprising at least one human binding domain avoid some of the problems associated with antibodies or antibody constructs that possess non-human such as rodent (e.g. murine, rat, hamster or rabbit) variable and/or constant regions. The presence of such rodent derived proteins can lead to the rapid clearance of the antibodies or antibody constructs or can lead to the generation of an immune response against the antibody or antibody construct by a patient. To avoid the use of rodent-derived antibody constructs, humanized or fully human antibody constructs can be generated through the introduction of human antibody function into a rodent so that the rodent produces fully human antibodies.

[0497] In some embodiments, the antibody construct of the invention is an “isolated” or “substantially pure” antibody construct. “Isolated” or “substantially pure”, when used to describe the antibody constructs disclosed herein, means an antibody construct that has been identified, separated and/or recovered from a component of its production environment. Preferably, the antibody construct is free or substantially free of association with all other components from its production environment. Contaminant components of its production environment, such as that resulting from recombinant transfected cells, are materials that could interfere with diagnostic or therapeutic uses for the antibody construct, and may include enzymes, hormones, and other proteinaceous or non-proteinaceous compounds. It is understood that the isolated or substantially pure antibody construct may constitute from 5% to 99.9% by weight of the total protein/polypeptide content in a given sample, depending on the circumstances. The desired antibody construct may be produced at a significantly higher concentration through the use of an inducible promoter or high expression promoter. The definition includes the production of an antibody construct in a wide variety of organisms and/or host cells that are known in the art. In certain embodiments, the antibody construct will be purified (1) to a degree sufficient to obtain at least 15 residues of N-terminal or internal amino acid sequence by use of a spinning cup sequenator, or (2) to homogeneity by SDS-PAGE under non-reducing or reducing conditions using Coomassie blue or, preferably, silver staining. Usually, however, an isolated antibody construct will be prepared by at least one purification step.

[0498] According to one embodiment, the entire antibody construct and/or the binding domains are in the form of one or more polypeptides or in the form of proteins. In addition to proteinaceous parts, such polypeptides or proteins may include non-proteinaceous parts (e.g. chemical linkers or chemical cross-linking agents such as glutaraldehyde).

[0499] Peptides are short chains of amino acid monomers linked by covalent peptide (amide) bonds. Hence, peptides fall under the broad chemical classes of biological oligomers and polymers. Amino acids that are part of a peptide or polypeptide chain are termed “residues” and can be consecutively numbered. All peptides except cyclic peptides have an N-terminal residue at one end and a C-terminal residue at the other end of the peptide. An oligopeptide consists of only a few amino acids (usually between two and twenty). A polypeptide is a longer, continuous, and unbranched peptide chain. Peptides are distinguished from proteins on the basis of size, and as an arbitrary benchmark can be understood to contain approximately 50 or fewer amino acids. Proteins consist of one or more polypeptides, usually arranged in a biologically functional way. While aspects of the lab techniques applied to peptides versus polypeptides and proteins differ (e.g., the specifics of electrophoresis, chromatography, etc.), the size boundaries that distinguish peptides from polypeptides and proteins are not absolute. Therefore, in the context of the present invention, the terms “peptide”, “polypeptide” and “protein” may be used interchangeably, and the term “polypeptide” is often preferred.

[0500] Polypeptides may further form multimers such as dimers, trimers and higher oligomers, which consist of more than one polypeptide molecule. Polypeptide molecules forming such dimers, trimers etc. may be identical or non-identical. The corresponding structures of higher order of such multimers are, consequently, termed homo- or heterodimers, homo- or heterotrimers etc. An example for a hereteromultimer is an antibody or immunoglobulin molecule, which, in its naturally occurring form, consists of two identical light polypeptide chains and two identical heavy polypeptide chains. The terms “peptide”, “polypeptide” and “protein” also refer to naturally modified peptides/polypeptides/proteins wherein the modification is accomplished e.g. by post-translational modifications like glycosylation, acetylation, phosphorylation and the like. A “peptide”, “polypeptide” or “protein” when referred to herein may also be chemically modified such as pegylated. Such modifications are well known in the art.

[0501] The antibody construct of the present invention is typically formulated in a pharmaceutical composition or a formulation. Materials of a pharmaceutical composition are usually formulated in concentrations that are acceptable for the site of administration. Formulations and compositions thus may be designed in accordance with the invention for delivery by any suitable route of administration.

[0502] As used herein, the term “pharmaceutical composition” relates to a composition which is suitable for administration to a patient, preferably a human patient. The particularly preferred pharmaceutical composition of this invention comprises one or a plurality of the antibody construct(s) of the invention, usually in a therapeutically effective amount. The pharmaceutical composition may further comprise suitable formulations of one or more (pharmaceutically effective) carriers, stabilizers, excipients, diluents, solubilizers, surfactants, emulsifiers, preservatives and/or adjuvants. Acceptable constituents of the composition are typically nontoxic to recipients at the dosages and concentrations employed. Pharmaceutical compositions of the invention include, but are not limited to, liquid, frozen, and lyophilized compositions. If the pharmaceutical composition has been lyophilized, the lyophilized material is reconstituted in an appropriate liquid prior to administration. The lyophilized material may e.g. be reconstituted in bacteriostatic water for injection (BWFI), physiological saline, phosphate buffered saline (PBS), or the same formulation the protein had been in prior to lyophilization.

[0503] The compositions may comprise a pharmaceutically acceptable carrier. In general, as used herein, “pharmaceutically acceptable carrier” means any and all aqueous and non-aqueous solutions, sterile solutions, solvents, buffers, e.g. phosphate buffered saline (PBS) solutions, water, suspensions, emulsions, such as oil/water emulsions, various types of wetting agents, liposomes, dispersion media and coatings, which are compatible with pharmaceutical administration, in particular with parenteral administration. The use of such media and agents in pharmaceutical compositions is well known in the art, and the compositions comprising such carriers can be formulated by well-known conventional methods.

[0504] Certain embodiments provide pharmaceutical compositions comprising the antibody construct of the invention and further one or more excipients. Excipients can be used for a wide variety of purposes, such as adjusting physical, chemical, or biological properties of formulations, such as adjustment of viscosity, and or processes of the invention to improve effectiveness and/or to stabilize such formulations and processes against degradation and spoilage e.g. due to stresses that occur during manufacturing, shipping, storage, pre-use preparation, administration, and thereafter. Excipients should in general be used in their lowest effective concentrations.

[0505] In certain embodiments, the pharmaceutical composition may also contain formulation materials/substances for the purpose of modifying, maintaining or preserving certain characteristics of the composition such as the pH, osmolarity, viscosity, clarity, color, isotonicity, odor, sterility, stability, rate of dissolution or release, adsorption or penetration (see, Remington's Pharmaceutical Sciences, 18” Edition, 1990, Mack Publishing Company).

[0506] As used herein, the singular forms “a”, “an”, and “the” include plural references unless the context clearly indicates otherwise. Thus, for example, reference to “a reagent” includes one or more of such different reagents and reference to “the method” includes reference to equivalent steps and methods known to those of ordinary skill in the art that could be modified or substituted for the methods described herein.

[0507] Unless otherwise indicated, the term “at least” preceding a series of elements is to be understood to refer to every element in the series. Those skilled in the art will recognize, or be able to ascertain using no more than routine experimentation, many equivalents to the specific embodiments of the invention described herein. Such equivalents are intended to be encompassed by the present invention.

[0508] The term “and/or” wherever used herein includes the meaning of “and”, “or” and “all or any other combination of the elements connected by said term”.

[0509] The term “about” or “approximately” as used herein means within ±20%, preferably within ±15%, more preferably within ±10%, and most preferably within ±5% of a given value or range. It also includes the concrete value, e.g., “about 50” includes the value “50”.

[0510] Throughout this specification and the claims, unless the context requires otherwise, the word “comprise”, and variations such as “comprises” and “comprising”, will be understood to imply the inclusion of a stated integer or step or group of integers or steps but not the exclusion of any other integer or step or group of integer or step. When used herein the term “comprising” can be substituted with the term “containing” or “including” or sometimes when used herein with the term “having”.

[0511] When used herein “consisting of” excludes any element, step, or ingredient not specified in the claim element. When used herein, “consisting essentially of” does not exclude materials or steps that do not materially affect the basic and novel characteristics of the claim.

[0512] In each instance herein, any of the terms “comprising”, “consisting essentially of” and “consisting of” may be replaced with either of the other two terms.

[0513] It should be understood that the above description and the below examples provide exemplary arrangements, but the present invention is not limited to the particular methodologies, techniques, protocols, material, reagents, substances, etc., described herein and as such can vary. The terminology used herein is for the purpose of describing particular embodiments only, and is not intended to limit the scope of the present invention, which is defined solely by the claims. Aspects of the invention are provided in the independent claims. Some optional features of the invention are provided in the dependent claims.

[0514] All publications and patents cited throughout the text of this specification (including all patents, patent applications, scientific publications, manufacturer's specifications, instructions, etc.), whether supra or infra, are hereby incorporated by reference in their entirety. Nothing herein is to be construed as an admission that the invention is not entitled to antedate such disclosure by virtue of prior invention. To the extent the material incorporated by reference contradicts or is inconsistent with this specification, the specification will supersede any such material.

[0515] A better understanding of the present invention and of its advantages will be obtained from the following examples, offered for illustrative purposes only. The examples are not intended and should not be construed as to limit the scope of the present invention in any way.

### EXAMPLES

[0516] Background: AMG 701, an HLE BiTE® molecule which binds BCMA on Multiple Myeloma (MM) cells and CD3 on T cells, has activity in MM preclinical models. Objectives of this first-in-human study include evaluating safety and estimating the maximum tolerated dose (MTD) of AMG 701 in patients with relapsed/refractory (R/R) Multiple Myeloma (NCT03287908).

[0517] Methods: Weekly short-term IV infusions of AMG 701 were administered in 4-week cycles for as long as patients benefitted, first to single-patient cohorts (5, 15, 45 μg), then cohorts of ≥3 patients (140, 400, 800, 1200 μg), and possibly up to 10 patients in higher-dose cohorts (1600, 3000, 4500, 6500, 9000, 12000 μg). Eligible patients had MM relapsed after or intolerant to ≥2 lines with a proteasome inhibitor, IMiD, and anti-CD38 MAb (where approved and available). Excluded were patients with solely extramedullary disease (allowed in subsequent dose expansion), CNS involvement, prior BCMA-directed therapy, and immunosuppressive therapy. After a grade 3 dose-limiting toxicity (DLT) of cytokine release syndrome (CRS) at 1600 μg, for all target doses ≥1200 μg, an initial run-in dose of 800 μg was added, followed by step up to the target dose. MRD was defined as <1/105 cells, as measured per the FDA-authorized next generation sequencing assay Results (not including the follow-up results shown in Table 2): 47 patients received AMG 701 at doses ranging from 5 to 6500 μg, with an 800 μg run-in dose used for step-up to target doses of ≥1200 μg; patients are yet to be enrolled at additional planned doses of 9000 and 12000 μg, see also FIG. 1. Median age was 62 years, 21 patients (78%) had ≥5 prior lines of therapy. 12 patients are ongoing, MTD as defined per protocol has not yet been reached. No anti-AMG 701 antibodies were detected. Responses included 1 stringent complete response (sCR) at 800 μg and 4 partial responses (PRs), 2 PRs at 3000 μg, 1 PR at 4500 g, and 1 PR and a minimal response at 6500 μg. The patient with the sCR had an initial PR at 1 month, deepening to sCR at 4.3 months; this ongoing response has lasted 13.2 months, 9.8 of which were MRD-negative. The 4 PRs started at 1-3.7 months (responses were first assessed at 1 month), and the responses lasted up to 4 months (three ongoing).

[0518] Conclusions: In this FIH study with ongoing dose escalation and MTD not yet identified, AMG 701, an HLE antibody construct targeting CD3 and BCMA, showed encouraging activity in patients with heavily pre-treated R/R MM.

TABLE 1
Results of the AMG 701 FIH study. The table does not include
the single-patient cohorts 1-3 of 5, 15, and 45 μg.

| | # of | | | |
|---|---|---|---|---|
| Cohort: target | patients | Best | Any response (months) | |
| dose (μg)* | at dose | response | Onset | Duration |
| 4: 140 | 3 | — | | |
| 5: 400 | 4 | — | | |
| 6: 800 | 4 | sCR | 1.0 | 13.2+ |
| 7: 1600 | 1 | — | | |
| 8: 1200 | 4 | — | | |
| 9: 1600 | 8 | — | | |
| 10: 3000 | 10 | PR | 3.7 | 3.7+ |
| | | PR | 1.8 | 4.0 |
| 11: 4500 | 6 | PR | 1.9 | 1.0+ |
| 12: 6500 | 3 | PR | 1.0 (pend PR) | NA (pend PR) |
| | | MR | | |
| 13: 9000 | 3-10 | — | | |
| 14: 12000 | 4-6 | — | | |

+indicates responses are ongoing.
*Save for 1 patient at 1600 μg, i.e. the patient with the DLT of CRS, all patients receiving doses of ≥1200 μg received a step dose of 800 μg prior to receiving the target dose on Day 5 or 8.
The # of patients receiving the target dose on Day 5 is as follows: 1600 μg (n = 3), 3000 μg (n = 2), and 4500 μg (n = 2); all other patients received the target dose on Day 8.

TABLE 2
Follow-up of the results of the AMG 701 FIH study. The table
does not include the single-patient cohorts 1-3 of 5, 15, and
45 μg, and the table does not include cohorts 4-9 of 140
μg to 1600 μg (see Table 1). The sCR responder of cohort
6 (800 μg) in Table 1 has a response duration of 19.6+
months. + indicates responses are ongoing. All patients
shown in this Table 2 received a step dose of 800 μg prior
to receiving the target dose on day 3, 5 or 8.

| | Target | Day to | # of | | | |
|---|---|---|---|---|---|---|
| | dose | target | patients | Best | Any response (months) | |
| Cohort | (μg) | dose | at dose | response | Onset | Duration |
| 10 | 3000 | 8 | 11 | PR | 1.8 | 3.8 |
| | | 8 | | PR | 2.8 | 7.4 |
| | | 5 | | sCR | 1.0 | 3.9+ |
| 11 | 4500 | 8 | 7 | VGPR | 2.8 | 6.5+ |
| | | 5 | | VGPR | 1.9 | 4.7+ |
| 12 | 6500 | 8 | 9 | PR | 1.0 | 2.8+ |
| | | 8 | | VGPR | 1.9 | 5.8+ |
| | | 3 | | CR | 1.0 | 1.9+ |
| | | 3 | | VGPR | 1.0 | 6.5+ |

[0519] The IMWG response criteria for a complete response (see also http://imwg.myeloma.org/international-myeloma-working-group-imwg-uniform-response-criteria-for-multiple-myeloma/) are:
[0520] Negative M protein immunofixation on the serum and urine,
[0521] Disappearance of any soft tissue plasmacytomas, and
[0522] <5% plasma cells in bone marrow

[0523] The IMWG response criteria for a partial response are:
[0524] M protein electrophoresis: ≥50% reduction of serum M-protein and reduction in 24 hours urinary M-protein by ≥90% or to <200 mg/24 h
[0525] Free light chains (FLC): If the serum and urine M protein are unmeasurable, a ≥50% decrease in the difference between involved and uninvolved FLC levels is required in place of the M-protein criteria
[0526] If serum and urine M protein are not measurable, and serum free light assay is also not measurable: ≥50% reduction in plasma cells is required in place of M protein, provided baseline bone marrow plasma cell percentage was ≥30%
[0527] In addition to the above listed criteria, if present at baseline, a ≥50% reduction in the size of soft tissue plasmacytomas is also required

[0528] The IMWG response criteria for a very good partial response are:
[0529] Serum and urine M protein detectable by immunofixation but not on electrophoresis or ≥90% reduction in serum M-protein plus urine M-protein level <100 mg/24 h

1. A method of treating or ameliorating a B-cell maturation antigen (BCMA) positive neoplasm comprising administering an antibody construct comprising a first domain which binds to BCMA, a second domain which binds to CD3 and a third domain which extends the half-life of the antibody construct, wherein the antibody construct is administered at a minimum dose of 800 μg/day in at least one cycle, wherein one cycle comprises at least three individual administrations of the antibody construct.

2. The method according to claim 1, wherein the antibody construct is administered for 2, 3, 4, 5, 6, 7, 8, 9, 10, 11, 12, 13, 14, 15, 16, 17, 18, 19, 20, 21, 22, 23, 24, 25 or more cycles.

3. The method according to claim 1, wherein one cycle has
a) about 25 to about 30 days,
b) about 26 or 27 to about 29 days, or
c) about 28 days.

4. The method according to claim 1, wherein the antibody construct is administered at a dose of about 800 μg/day to 12 mg per day, such as 1000 μg, 1200 μg, 1500 μg, 1600 μg, 2000 μg, 2500 μg, 3000 μg, 3500 μg, 4000 μg, 4500 μg, 5000 μg, 5500 μg, 6000 μg, 6500 μg, 7000 μg, 7500 μg, 8000 μg, 8500 μg, 9000 μg, 9500 μg, 10 mg, 11 mg or 12 mg per day.

5. The method according to claim 1, wherein the antibody construct is administered in one or two dose steps during the first cycle.

6. The method according to claim 5, wherein a first dose is between 800 μg/day and 1200 μg/day, an optional second dose is between 2500 μg/day and 5000 μg/day, preferably about 3000 μg/day or about 4500 μg/day, and a last dose (target dose) is between 6500 μg/day and 12 mg/day, such as 6500 μg/day, 7000 μg/day, 7500 μg/day, 8000 μg/day, 8500 μg/day, 9000 μg/day, 9500 μg/day, 10 mg/day, 11 mg/day or 12 mg/day.

7. The method according to claim 1, wherein the first cycle comprises or consists of three to six individual administrations, preferably four or five individual administrations of the antibody construct.

8. The method according to claim 2, wherein the antibody construct is administered during the second cycle and optionally during any subsequent cycle at constant doses.

9. The method according to claim 1, wherein the antibody construct is administered parenterally, preferably intravenously, and more preferably via intravenous bolus injection, bolus infusion or short-term intravenous infusion.

10. The method according to claim 1, wherein the BCMA positive neoplasm is selected from the group consisting of multiple myeloma, relapsed and/or refractory multiple myeloma, heavy chain multiple myeloma, light chain multiple myeloma, extramedullary myeloma, plasmacytoma, plasma cell leukemia, Waldenström's macroglobulinemia, and smoldering myeloma.

11. The method according to claim 1, wherein
a) the antibody construct is a single chain polypeptide,
b) the first domain is in the format of an scFv,
c) the second domain is in the format of an scFv, and/or
d) the first domain and the second domain are connected via a linker, preferably a peptide linker, more preferably a glycine/serine linker.

12. The method according to claim 1, wherein the antibody construct competes for binding to BCMA with or which binds to the same epitope of BCMA as:
a) an antibody or antibody construct comprising a domain which binds to BCMA on the surface of a target cell, wherein said domain comprises a VH region comprising CDR-H1 as depicted in SEQ ID NO: 171, CDR-H2 as depicted in SEQ ID NO: 172, and CDR-H3 as depicted in SEQ ID NO: 173, and a VL region comprising CDR-L1 as depicted in SEQ ID NO: 174, CDR-L2 as depicted in SEQ ID NO: 175, and CDR-L3 as depicted in SEQ ID NO: 176;
b) an antibody or antibody construct comprising a domain which binds to BCMA on the surface of a target cell, wherein said domain comprises a VH region as depicted in SEQ ID NO: 177, and a VL region as depicted in SEQ ID NO: 178;
c) an antibody construct comprising a domain which binds to BCMA on the surface of a target cell, wherein said domain comprises the amino acid sequence as depicted in SEQ ID NO: 179; or
d) an antibody construct having the amino acid sequence as depicted in SEQ ID NO: 661.

13. The method according to claim 1, wherein the antibody construct competes for binding to CD3 with or which binds to the same epitope of CD3 as:
a) an antibody or antibody construct comprising a domain which binds to CD3 on the surface of a T cell, wherein said domain comprises a VH region comprising CDR-H1 as depicted in SEQ ID NO: 636, CDR-H2 as depicted in SEQ ID NO: 637, and CDR-H3 as depicted in SEQ ID NO: 638, and a VL region comprising CDR-L1 as depicted in SEQ ID NO: 633, CDR-L2 as depicted in SEQ ID NO: 634, CDR-L3 as depicted in SEQ ID NO: 635;
b) an antibody or antibody construct comprising a domain which binds to CD3 on the surface of a T cell, wherein said domain comprises a VH region as depicted in SEQ ID NO: 639, and a VL region as depicted in SEQ ID NO: 641;
c) an antibody construct comprising a domain which binds to CD3 on the surface of a T cell, wherein said domain comprises the amino acid sequence as depicted in SEQ ID NO: 642; or
d) an antibody construct having the amino acid sequence as depicted in SEQ ID NO: 661.

14. The method according to claim 1, wherein the first domain which binds to BCMA comprises a VH region comprising CDR-H1, CDR-H2 and CDR-H3 and a VL region comprising CDR-L1, CDR-L2 and CDR-L3 selected from:
(a) CDR-H1 as depicted in SEQ ID NO: 1, CDR-H2 as depicted in SEQ ID NO: 2, CDR-H3 as depicted in SEQ ID NO: 3, CDR-L1 as depicted in SEQ ID NO: 4, CDR-L2 as depicted in SEQ ID NO: 5, and CDR-L3 as depicted in SEQ ID NO: 6;
(b) CDR-H1 as depicted in SEQ ID NO: 11, CDR-H2 as depicted in SEQ ID NO: 12, CDR-H3 as depicted in SEQ ID NO: 13, CDR-L1 as depicted in SEQ ID NO: 14, CDR-L2 as depicted in SEQ ID NO: 15, and CDR-L3 as depicted in SEQ ID NO: 16;
(c) CDR-H1 as depicted in SEQ ID NO: 21, CDR-H2 as depicted in SEQ ID NO: 22, CDR-H3 as depicted in SEQ ID NO: 23, CDR-L1 as depicted in SEQ ID NO: 24, CDR-L2 as depicted in SEQ ID NO: 25, and CDR-L3 as depicted in SEQ ID NO: 26;
(d) CDR-H1 as depicted in SEQ ID NO: 31, CDR-H2 as depicted in SEQ ID NO: 32, CDR-H3 as depicted in SEQ ID NO: 33, CDR-L1 as depicted in SEQ ID NO: 34, CDR-L2 as depicted in SEQ ID NO: 35, and CDR-L3 as depicted in SEQ ID NO: 36;
(e) CDR-H1 as depicted in SEQ ID NO: 41, CDR-H2 as depicted in SEQ ID NO: 42, CDR-H3 as depicted in SEQ ID NO: 43, CDR-L1 as depicted in SEQ ID NO: 44, CDR-L2 as depicted in SEQ ID NO: 45, and CDR-L3 as depicted in SEQ ID NO: 46;
(f) CDR-H1 as depicted in SEQ ID NO: 51, CDR-H2 as depicted in SEQ ID NO: 52, CDR-H3 as depicted in SEQ ID NO: 53, CDR-L1 as depicted in SEQ ID NO: 54, CDR-L2 as depicted in SEQ ID NO: 55, and CDR-L3 as depicted in SEQ ID NO: 56;
(g) CDR-H1 as depicted in SEQ ID NO: 61, CDR-H2 as depicted in SEQ ID NO: 62, CDR-H3 as depicted in SEQ ID NO: 63, CDR-L1 as depicted in SEQ ID NO: 64, CDR-L2 as depicted in SEQ ID NO: 65, and CDR-L3 as depicted in SEQ ID NO: 66;
(h) CDR-H1 as depicted in SEQ ID NO: 71, CDR-H2 as depicted in SEQ ID NO: 72, CDR-H3 as depicted in SEQ ID NO: 73, CDR-L1 as depicted in SEQ ID NO: 74, CDR-L2 as depicted in SEQ ID NO: 75, and CDR-L3 as depicted in SEQ ID NO: 76;
(i) CDR-H1 as depicted in SEQ ID NO: 81, CDR-H2 as depicted in SEQ ID NO: 82, CDR-H3 as depicted in SEQ ID NO: 83, CDR-L1 as depicted in SEQ ID NO: 84, CDR-L2 as depicted in SEQ ID NO: 85, and CDR-L3 as depicted in SEQ ID NO: 86;
(j) CDR-H1 as depicted in SEQ ID NO: 91, CDR-H2 as depicted in SEQ ID NO: 92, CDR-H3 as depicted in SEQ ID NO: 93, CDR-L1 as depicted in SEQ ID NO: 94, CDR-L2 as depicted in SEQ ID NO: 95, and CDR-L3 as depicted in SEQ ID NO: 96;
(k) CDR-H1 as depicted in SEQ ID NO: 101, CDR-H2 as depicted in SEQ ID NO: 102, CDR-H3 as depicted in SEQ ID NO: 103, CDR-L1 as depicted in SEQ ID NO: 104, CDR-L2 as depicted in SEQ ID NO: 105, and CDR-L3 as depicted in SEQ ID NO: 106;
(l) CDR-H1 as depicted in SEQ ID NO: 111, CDR-H2 as depicted in SEQ ID NO: 112, CDR-H3 as depicted in SEQ ID NO: 113, CDR-L1 as depicted in SEQ ID NO: 114, CDR-L2 as depicted in SEQ ID NO: 115, and CDR-L3 as depicted in SEQ ID NO: 116;
(m) CDR-H1 as depicted in SEQ ID NO: 121, CDR-H2 as depicted in SEQ ID NO: 122, CDR-H3 as depicted in SEQ ID NO: 123, CDR-L1 as depicted in SEQ ID NO: 124, CDR-L2 as depicted in SEQ ID NO: 125, and CDR-L3 as depicted in SEQ ID NO: 126;
(n) CDR-H1 as depicted in SEQ ID NO: 131, CDR-H2 as depicted in SEQ ID NO: 132, CDR-H3 as depicted in SEQ ID NO: 133, CDR-L1 as depicted in SEQ ID NO: 134, CDR-L2 as depicted in SEQ ID NO: 135, and CDR-L3 as depicted in SEQ ID NO: 136;
(o) CDR-H1 as depicted in SEQ ID NO: 141, CDR-H2 as depicted in SEQ ID NO: 142, CDR-H3 as depicted in SEQ ID NO: 143, CDR-L1 as depicted in SEQ ID NO: 144, CDR-L2 as depicted in SEQ ID NO: 145, and CDR-L3 as depicted in SEQ ID NO: 146;
(p) CDR-H1 as depicted in SEQ ID NO: 151, CDR-H2 as depicted in SEQ ID NO: 152, CDR-H3 as depicted in SEQ ID NO: 153, CDR-L1 as depicted in SEQ ID NO: 154, CDR-L2 as depicted in SEQ ID NO: 155, and CDR-L3 as depicted in SEQ ID NO: 156;
(q) CDR-H1 as depicted in SEQ ID NO: 161, CDR-H2 as depicted in SEQ ID NO: 162, CDR-H3 as depicted in SEQ ID NO: 163, CDR-L1 as depicted in SEQ ID NO: 164, CDR-L2 as depicted in SEQ ID NO: 165, and CDR-L3 as depicted in SEQ ID NO: 166;
(r) CDR-H1 as depicted in SEQ ID NO: 171, CDR-H2 as depicted in SEQ ID NO: 172, CDR-H3 as depicted in SEQ ID NO: 173, CDR-L1 as depicted in SEQ ID NO: 174, CDR-L2 as depicted in SEQ ID NO: 175, and CDR-L3 as depicted in SEQ ID NO: 176;
(s) CDR-H1 as depicted in SEQ ID NO: 181, CDR-H2 as depicted in SEQ ID NO: 182, CDR-H3 as depicted in SEQ ID NO: 183, CDR-L1 as depicted in SEQ ID NO: 184, CDR-L2 as depicted in SEQ ID NO: 185, and CDR-L3 as depicted in SEQ ID NO: 186;
(t) CDR-H1 as depicted in SEQ ID NO: 191, CDR-H2 as depicted in SEQ ID NO: 192, CDR-H3 as depicted in SEQ ID NO: 193, CDR-L1 as depicted in SEQ ID NO: 194, CDR-L2 as depicted in SEQ ID NO: 195, and CDR-L3 as depicted in SEQ ID NO: 196;
(u) CDR-H1 as depicted in SEQ ID NO: 201, CDR-H2 as depicted in SEQ ID NO: 202, CDR-H3 as depicted in SEQ ID NO: 203, CDR-L1 as depicted in SEQ ID NO: 204, CDR-L2 as depicted in SEQ ID NO: 205, and CDR-L3 as depicted in SEQ ID NO: 206;
(v) CDR-H1 as depicted in SEQ ID NO: 211, CDR-H2 as depicted in SEQ ID NO: 212, CDR-H3 as depicted in SEQ ID NO: 213, CDR-L1 as depicted in SEQ ID NO: 214, CDR-L2 as depicted in SEQ ID NO: 215, and CDR-L3 as depicted in SEQ ID NO: 216;
(w) CDR-H1 as depicted in SEQ ID NO: 221, CDR-H2 as depicted in SEQ ID NO: 222, CDR-H3 as depicted in SEQ ID NO: 223, CDR-L1 as depicted in SEQ ID NO: 224, CDR-L2 as depicted in SEQ ID NO: 225, and CDR-L3 as depicted in SEQ ID NO: 226;
(x) CDR-H1 as depicted in SEQ ID NO: 231, CDR-H2 as depicted in SEQ ID NO: 232, CDR-H3 as depicted in SEQ ID NO: 233, CDR-L1 as depicted in SEQ ID NO: 234, CDR-L2 as depicted in SEQ ID NO: 235, and CDR-L3 as depicted in SEQ ID NO: 236;
(y) CDR-H1 as depicted in SEQ ID NO: 241, CDR-H2 as depicted in SEQ ID NO: 242, CDR-H3 as depicted in SEQ ID NO: 243, CDR-L1 as depicted in SEQ ID NO: 244, CDR-L2 as depicted in SEQ ID NO: 245, and CDR-L3 as depicted in SEQ ID NO: 246;
(z) CDR-H1 as depicted in SEQ ID NO: 251, CDR-H2 as depicted in SEQ ID NO: 252, CDR-H3 as depicted in SEQ ID NO: 253, CDR-L1 as depicted in SEQ ID NO: 254, CDR-L2 as depicted in SEQ ID NO: 255, and CDR-L3 as depicted in SEQ ID NO: 256;
(aa) CDR-H1 as depicted in SEQ ID NO: 261, CDR-H2 as depicted in SEQ ID NO: 262, CDR-H3 as depicted in SEQ ID NO: 263, CDR-L1 as depicted in SEQ ID NO: 264, CDR-L2 as depicted in SEQ ID NO: 265, and CDR-L3 as depicted in SEQ ID NO: 266;
(ab) CDR-H1 as depicted in SEQ ID NO: 271, CDR-H2 as depicted in SEQ ID NO: 272, CDR-H3 as depicted in SEQ ID NO: 273, CDR-L1 as depicted in SEQ ID NO: 274, CDR-L2 as depicted in SEQ ID NO: 275, and CDR-L3 as depicted in SEQ ID NO: 276;
(ac) CDR-H1 as depicted in SEQ ID NO: 281, CDR-H2 as depicted in SEQ ID NO: 282, CDR-H3 as depicted in SEQ ID NO: 283, CDR-L1 as depicted in SEQ ID NO: 284, CDR-L2 as depicted in SEQ ID NO: 285, and CDR-L3 as depicted in SEQ ID NO: 286;
(ad) CDR-H1 as depicted in SEQ ID NO: 291, CDR-H2 as depicted in SEQ ID NO: 292, CDR-H3 as depicted in SEQ ID NO: 293, CDR-L1 as depicted in SEQ ID NO: 294, CDR-L2 as depicted in SEQ ID NO: 295, and CDR-L3 as depicted in SEQ ID NO: 296;
(ae) CDR-H1 as depicted in SEQ ID NO: 301, CDR-H2 as depicted in SEQ ID NO: 302, CDR-H3 as depicted in SEQ ID NO: 303, CDR-L1 as depicted in SEQ ID NO: 304, CDR-L2 as depicted in SEQ ID NO: 305, and CDR-L3 as depicted in SEQ ID NO: 306;
(af) CDR-H1 as depicted in SEQ ID NO: 311, CDR-H2 as depicted in SEQ ID NO: 312, CDR-H3 as depicted in SEQ ID NO: 313, CDR-L1 as depicted in SEQ ID NO: 314, CDR-L2 as depicted in SEQ ID NO: 315, and CDR-L3 as depicted in SEQ ID NO: 316;
(ag) CDR-H1 as depicted in SEQ ID NO: 321, CDR-H2 as depicted in SEQ ID NO: 322, CDR-H3 as depicted in SEQ ID NO: 323, CDR-L1 as depicted in SEQ ID NO: 324, CDR-L2 as depicted in SEQ ID NO: 325, and CDR-L3 as depicted in SEQ ID NO: 326;
(ah) CDR-H1 as depicted in SEQ ID NO: 331, CDR-H2 as depicted in SEQ ID NO: 332, CDR-H3 as depicted in SEQ ID NO: 333, CDR-L1 as depicted in SEQ ID NO: 334, CDR-L2 as depicted in SEQ ID NO: 335, and CDR-L3 as depicted in SEQ ID NO: 336;
(ai) CDR-H1 as depicted in SEQ ID NO: 341, CDR-H2 as depicted in SEQ ID NO: 342, CDR-H3 as depicted in SEQ ID NO: 343, CDR-L1 as depicted in SEQ ID NO: 344, CDR-L2 as depicted in SEQ ID NO: 345, and CDR-L3 as depicted in SEQ ID NO: 346;
(aj) CDR-H1 as depicted in SEQ ID NO: 351, CDR-H2 as depicted in SEQ ID NO: 352, CDR-H3 as depicted in SEQ ID NO: 353, CDR-L1 as depicted in SEQ ID NO: 354, CDR-L2 as depicted in SEQ ID NO: 355, and CDR-L3 as depicted in SEQ ID NO: 356;
(ak) CDR-H1 as depicted in SEQ ID NO: 361, CDR-H2 as depicted in SEQ ID NO: 362, CDR-H3 as depicted in SEQ ID NO: 363, CDR-L1 as depicted in SEQ ID NO: 364, CDR-L2 as depicted in SEQ ID NO: 365, and CDR-L3 as depicted in SEQ ID NO: 366;
(al) CDR-H1 as depicted in SEQ ID NO: 371, CDR-H2 as depicted in SEQ ID NO: 372, CDR-H3 as depicted in SEQ ID NO: 373, CDR-L1 as depicted in SEQ ID NO: 374, CDR-L2 as depicted in SEQ ID NO: 375, and CDR-L3 as depicted in SEQ ID NO: 376;
(am) CDR-H1 as depicted in SEQ ID NO: 381, CDR-H2 as depicted in SEQ ID NO: 382, CDR-H3 as depicted in SEQ ID NO: 383, CDR-L1 as depicted in SEQ ID NO: 384, CDR-L2 as depicted in SEQ ID NO: 385, and CDR-L3 as depicted in SEQ ID NO: 386;
(an) CDR-H1 as depicted in SEQ ID NO: 391, CDR-H2 as depicted in SEQ ID NO: 392, CDR-H3 as depicted in SEQ ID NO: 393, CDR-L1 as depicted in SEQ ID NO: 394, CDR-L2 as depicted in SEQ ID NO: 395, and CDR-L3 as depicted in SEQ ID NO: 396;
(ao) CDR-H1 as depicted in SEQ ID NO: 401, CDR-H2 as depicted in SEQ ID NO: 402, CDR-H3 as depicted in SEQ ID NO: 403, CDR-L1 as depicted in SEQ ID NO: 404, CDR-L2 as depicted in SEQ ID NO: 405, and CDR-L3 as depicted in SEQ ID NO: 406;
(ap) CDR-H1 as depicted in SEQ ID NO: 411, CDR-H2 as depicted in SEQ ID NO: 412, CDR-H3 as depicted in SEQ ID NO: 413, CDR-L1 as depicted in SEQ ID NO: 414, CDR-L2 as depicted in SEQ ID NO: 415, and CDR-L3 as depicted in SEQ ID NO: 416;
(aq) CDR-H1 as depicted in SEQ ID NO: 421, CDR-H2 as depicted in SEQ ID NO: 422, CDR-H3 as depicted in SEQ ID NO: 423, CDR-L1 as depicted in SEQ ID NO: 424, CDR-L2 as depicted in SEQ ID NO: 425, and CDR-L3 as depicted in SEQ ID NO: 426;
(ar) CDR-H1 as depicted in SEQ ID NO: 431, CDR-H2 as depicted in SEQ ID NO: 432, CDR-H3 as depicted in SEQ ID NO: 433, CDR-L1 as depicted in SEQ ID NO: 434, CDR-L2 as depicted in SEQ ID NO: 435, and CDR-L3 as depicted in SEQ ID NO: 436;
(as) CDR-H1 as depicted in SEQ ID NO: 441, CDR-H2 as depicted in SEQ ID NO: 442, CDR-H3 as depicted in SEQ ID NO: 443, CDR-L1 as depicted in SEQ ID NO: 444, CDR-L2 as depicted in SEQ ID NO: 445, and CDR-L3 as depicted in SEQ ID NO: 446;
(at) CDR-H1 as depicted in SEQ ID NO: 451, CDR-H2 as depicted in SEQ ID NO: 452, CDR-H3 as depicted in SEQ ID NO: 453, CDR-L1 as depicted in SEQ ID NO: 454, CDR-L2 as depicted in SEQ ID NO: 455, and CDR-L3 as depicted in SEQ ID NO: 456;
(au) CDR-H1 as depicted in SEQ ID NO: 461, CDR-H2 as depicted in SEQ ID NO: 462, CDR-H3 as depicted in SEQ ID NO: 463, CDR-L1 as depicted in SEQ ID NO: 464, CDR-L2 as depicted in SEQ ID NO: 465, and CDR-L3 as depicted in SEQ ID NO: 466;
(av) CDR-H1 as depicted in SEQ ID NO: 471, CDR-H2 as depicted in SEQ ID NO: 472, CDR-H3 as depicted in SEQ ID NO: 473, CDR-L1 as depicted in SEQ ID NO: 474, CDR-L2 as depicted in SEQ ID NO: 475, and CDR-L3 as depicted in SEQ ID NO: 476;
(aw) CDR-H1 as depicted in SEQ ID NO: 481, CDR-H2 as depicted in SEQ ID NO: 482, CDR-H3 as depicted in SEQ ID NO: 483, CDR-L1 as depicted in SEQ ID NO: 484, CDR-L2 as depicted in SEQ ID NO: 485, and CDR-L3 as depicted in SEQ ID NO: 486;
(ax) CDR-H1 as depicted in SEQ ID NO: 491, CDR-H2 as depicted in SEQ ID NO: 492, CDR-H3 as depicted in SEQ ID NO: 493, CDR-L1 as depicted in SEQ ID NO: 494, CDR-L2 as depicted in SEQ ID NO: 495, and CDR-L3 as depicted in SEQ ID NO: 496;
(ay) CDR-H1 as depicted in SEQ ID NO: 501, CDR-H2 as depicted in SEQ ID NO: 502, CDR-H3 as depicted in SEQ ID NO: 503, CDR-L1 as depicted in SEQ ID NO: 504, CDR-L2 as depicted in SEQ ID NO: 505, and CDR-L3 as depicted in SEQ ID NO: 506;
(az) CDR-H1 as depicted in SEQ ID NO: 511, CDR-H2 as depicted in SEQ ID NO: 512, CDR-H3 as depicted in SEQ ID NO: 513, CDR-L1 as depicted in SEQ ID NO: 514, CDR-L2 as depicted in SEQ ID NO: 515, and CDR-L3 as depicted in SEQ ID NO: 516; and
(ba) CDR-H1 as depicted in SEQ ID NO: 521, CDR-H2 as depicted in SEQ ID NO: 522, CDR-H3 as depicted in SEQ ID NO: 523, CDR-L1 as depicted in SEQ ID NO: 524, CDR-L2 as depicted in SEQ ID NO: 525, and CDR-L3 as depicted in SEQ ID NO: 526.

15. The method according to claim 1, wherein the first domain which binds to BCMA comprises a VH region having an amino acid sequence selected from the group consisting of those depicted in SEQ ID NOs: 7, 17, 27, 37, 47, 57, 67, 77, 87, 97, 107, 117, 127, 137, 147, 157, 167, 177, 187, 197, 207, 217, 227, 237, 247, 257, 267, 277, 287, 307, 317, 327, 337, 347, 357, 367, 377, 387, 397, 407, 417, 427, 437, 447, 457, 467, 477, 487, 497, 507, 517, and 527.

16. The method according to claim 1, wherein the first domain which binds to BCMA comprises a VL region having an amino acid sequence selected from the group consisting of those depicted in SEQ ID NOs: 8, 18, 28, 38, 48, 58, 68, 78, 88, 98, 108, 118, 128, 138, 148, 158, 168, 178, 188, 198, 208, 218, 228, 238, 248, 258, 268, 278, 288, 298, 308, 318, 328, 338, 348, 358, 368, 378, 388, 398, 408, 418, 428, 438, 448, 458, 468, 478, 488, 498, 508, 518, and 528.

17. The method according to claim 1, wherein the first domain which binds to BCMA comprises a VH region and a VL region selected from the group consisting of:
(a) a VH region as depicted in SEQ ID NO: 7 and a VL region as depicted in SEQ ID NO: 8;
(b) a VH region as depicted in SEQ ID NO: 17 and a VL region as depicted in SEQ ID NO: 18;
(c) a VH region as depicted in SEQ ID NO: 27 and a VL region as depicted in SEQ ID NO: 28;
(d) a VH region as depicted in SEQ ID NO: 37 and a VL region as depicted in SEQ ID NO: 38;
(e) a VH region as depicted in SEQ ID NO: 47 and a VL region as depicted in SEQ ID NO: 48;
(f) a VH region as depicted in SEQ ID NO: 57 and a VL region as depicted in SEQ ID NO: 58;
(g) a VH region as depicted in SEQ ID NO: 67 and a VL region as depicted in SEQ ID NO: 68;
(h) a VH region as depicted in SEQ ID NO: 77 and a VL region as depicted in SEQ ID NO: 78;
(i) a VH region as depicted in SEQ ID NO: 87 and a VL region as depicted in SEQ ID NO: 88;
(j) a VH region as depicted in SEQ ID NO: 97 and a VL region as depicted in SEQ ID NO: 98;
(k) a VH region as depicted in SEQ ID NO: 107 and a VL region as depicted in SEQ ID NO: 108;
(l) a VH region as depicted in SEQ ID NO: 117 and a VL region as depicted in SEQ ID NO: 118;
(m) a VH region as depicted in SEQ ID NO: 127 and a VL region as depicted in SEQ ID NO: 128;
(n) a VH region as depicted in SEQ ID NO: 137 and a VL region as depicted in SEQ ID NO: 138;
(o) a VH region as depicted in SEQ ID NO: 147 and a VL region as depicted in SEQ ID NO: 148;
(p) a VH region as depicted in SEQ ID NO: 157 and a VL region as depicted in SEQ ID NO: 158;
(q) a VH region as depicted in SEQ ID NO: 167 and a VL region as depicted in SEQ ID NO: 168;
(r) a VH region as depicted in SEQ ID NO: 177 and a VL region as depicted in SEQ ID NO: 178;
(s) a VH region as depicted in SEQ ID NO: 187 and a VL region as depicted in SEQ ID NO: 188;
(t) a VH region as depicted in SEQ ID NO: 197 and a VL region as depicted in SEQ ID NO: 198;
(u) a VH region as depicted in SEQ ID NO: 207 and a VL region as depicted in SEQ ID NO: 208;
(v) a VH region as depicted in SEQ ID NO: 217 and a VL region as depicted in SEQ ID NO: 218;
(w) a VH region as depicted in SEQ ID NO: 227 and a VL region as depicted in SEQ ID NO: 228;
(x) a VH region as depicted in SEQ ID NO: 237 and a VL region as depicted in SEQ ID NO: 238;
(y) a VH region as depicted in SEQ ID NO: 247 and a VL region as depicted in SEQ ID NO: 248;
(z) a VH region as depicted in SEQ ID NO: 257 and a VL region as depicted in SEQ ID NO: 258;
(aa) a VH region as depicted in SEQ ID NO: 267 and a VL region as depicted in SEQ ID NO: 268;
(ab) a VH region as depicted in SEQ ID NO: 277 and a VL region as depicted in SEQ ID NO: 278;
(ac) a VH region as depicted in SEQ ID NO: 287 and a VL region as depicted in SEQ ID NO: 288;
(ad) a VH region as depicted in SEQ ID NO: 297 and a VL region as depicted in SEQ ID NO: 298;
(ae) a VH region as depicted in SEQ ID NO: 307 and a VL region as depicted in SEQ ID NO: 308;
(af) a VH region as depicted in SEQ ID NO: 317 and a VL region as depicted in SEQ ID NO: 318;
(ag) a VH region as depicted in SEQ ID NO: 327 and a VL region as depicted in SEQ ID NO: 328;
(ah) a VH region as depicted in SEQ ID NO: 337 and a VL region as depicted in SEQ ID NO: 338;
(ai) a VH region as depicted in SEQ ID NO: 347 and a VL region as depicted in SEQ ID NO: 348;
(aj) a VH region as depicted in SEQ ID NO: 357 and a VL region as depicted in SEQ ID NO: 358;
(ak) a VH region as depicted in SEQ ID NO: 367 and a VL region as depicted in SEQ ID NO: 368;
(al) a VH region as depicted in SEQ ID NO: 377 and a VL region as depicted in SEQ ID NO: 378;
(am) a VH region as depicted in SEQ ID NO: 387 and a VL region as depicted in SEQ ID NO: 388;
(an) a VH region as depicted in SEQ ID NO: 397 and a VL region as depicted in SEQ ID NO: 398;
(ao) a VH region as depicted in SEQ ID NO: 407 and a VL region as depicted in SEQ ID NO: 408;
(ap) a VH region as depicted in SEQ ID NO: 417 and a VL region as depicted in SEQ ID NO: 418;
(aq) a VH region as depicted in SEQ ID NO: 427 and a VL region as depicted in SEQ ID NO: 428;
(ar) a VH region as depicted in SEQ ID NO: 437 and a VL region as depicted in SEQ ID NO: 438;
(as) a VH region as depicted in SEQ ID NO: 447 and a VL region as depicted in SEQ ID NO: 448;
(at) a VH region as depicted in SEQ ID NO: 457 and a VL region as depicted in SEQ ID NO: 458;
(au) a VH region as depicted in SEQ ID NO: 467 and a VL region as depicted in SEQ ID NO: 468;
(av) a VH region as depicted in SEQ ID NO: 477 and a VL region as depicted in SEQ ID NO: 478;
(aw) a VH region as depicted in SEQ ID NO: 487 and a VL region as depicted in SEQ ID NO: 488;
(ax) a VH region as depicted in SEQ ID NO: 497 and a VL region as depicted in SEQ ID NO: 498;
(ay) a VH region as depicted in SEQ ID NO: 507 and a VL region as depicted in SEQ ID NO: 508;
(az) a VH region as depicted in SEQ ID NO: 517 and a VL region as depicted in SEQ ID NO: 518; and
(ba) a VH region as depicted in SEQ ID NO: 527 and a VL region as depicted in SEQ ID NO: 528.

18. The method according to claim 1, wherein the first domain which binds to BCMA comprises or consists of a polypeptide having an amino acid sequence selected from the group consisting of SEQ ID NOs: 9, 19, 29, 39, 49, 59, 69, 79, 89, 109, 129, 139, 149, 159, 169, 179, 189, 199, 209, 219, 229, 239, 249, 259, 269, 279, 289, 299, 309, 319, 329, 339, 349, 359, 369, 379, 389, 399, 409, 419, 429, 439, 449, 459, 469, 479, 489, 499, 519, and 529.

19. The method according to claim 1, wherein the second domain which binds to CD3 comprises a VL region comprising CDR-L1, CDR-L2 and CDR-L3 selected from the group consisting of:
(a) CDR-L1 as depicted in SEQ ID NO: 542, CDR-L2 as depicted in SEQ ID NO: 543, and CDR-L3 as depicted in SEQ ID NO: 544;
(b) CDR-L1 as depicted in SEQ ID NO: 599, CDR-L2 as depicted in SEQ ID NO: 600, and CDR-L3 as depicted in SEQ ID NO: 601; and
(c) CDR-L1 as depicted in SEQ ID NO: 621, CDR-L2 as depicted in SEQ ID NO: 622, and CDR-L3 as depicted in SEQ ID NO: 623.

20. The method according to claim 1, wherein the second domain which binds to CD3 comprises a VH region comprising CDR-H1, CDR-H2 and CDR-H3 selected from the group consisting of:
(a) CDR-H1 as depicted in SEQ ID NO: 534, CDR-H2 as depicted in SEQ ID NO: 535, and CDR-H3 as depicted in SEQ ID NO: 536;
(b) CDR-H1 as depicted in SEQ ID NO: 545, CDR-H2 as depicted in SEQ ID NO: 546, and CDR-H3 as depicted in SEQ ID NO: 547;
(c) CDR-H1 as depicted in SEQ ID NO: 557, CDR-H2 as depicted in SEQ ID NO: 558, and CDR-H3 as depicted in SEQ ID NO: 559;
(d) CDR-H1 as depicted in SEQ ID NO: 568, CDR-H2 as depicted in SEQ ID NO: 569, and CDR-H3 as depicted in SEQ ID NO: 570;
(e) CDR-H1 as depicted in SEQ ID NO: 579, CDR-H2 as depicted in SEQ ID NO: 580, and CDR-H3 as depicted in SEQ ID NO: 581;
(f) CDR-H1 as depicted in SEQ ID NO: 591, CDR-H2 as depicted in SEQ ID NO: 592, and CDR-H3 as depicted in SEQ ID NO: 593;
(g) CDR-H1 as depicted in SEQ ID NO: 602, CDR-H2 as depicted in SEQ ID NO: 603, and CDR-H3 as depicted in SEQ ID NO: 604;
(h) CDR-H1 as depicted in SEQ ID NO: 613, CDR-H2 as depicted in SEQ ID NO: 614, and CDR-H3 as depicted in SEQ ID NO: 615;
(i) CDR-H1 as depicted in SEQ ID NO: 624, CDR-H2 as depicted in SEQ ID NO: 625, and CDR-H3 as depicted in SEQ ID NO: 626; and
(j) CDR-H1 as depicted in SEQ ID NO: 636, CDR-H2 as depicted in SEQ ID NO: 637, and CDR-H3 as depicted in SEQ ID NO: 638.

21. The method according to claim 1, wherein the second domain which binds to CD3 comprises a VL region comprising CDR-L1, CDR-L2 and CDR-L3 and a VH region comprising CDR-H1, CDR-H2 and CDR-H3 selected from the group consisting of:
(a) CDR-L1 as depicted in SEQ ID NO: 531, CDR-L2 as depicted in SEQ ID NO: 532, CDR-L3 as depicted in SEQ ID NO: 533, CDR-H1 as depicted in SEQ ID NO: 534, CDR-H2 as depicted in SEQ ID NO: 535, and CDR-H3 as depicted in SEQ ID NO: 536;
(b) CDR-L1 as depicted in SEQ ID NO: 542, CDR-L2 as depicted in SEQ ID NO: 543, CDR-L3 as depicted in SEQ ID NO: 544, CDR-H1 as depicted in SEQ ID NO: 545, CDR-H2 as depicted in SEQ ID NO: 546, and CDR-H3 as depicted in SEQ ID NO: 547;
(c) CDR-L1 as depicted in SEQ ID NO: 554, CDR-L2 as depicted in SEQ ID NO: 555, CDR-L3 as depicted in SEQ ID NO: 556, CDR-H1 as depicted in SEQ ID NO: 557, CDR-H2 as depicted in SEQ ID NO: 558, and CDR-H3 as depicted in SEQ ID NO: 559;
(d) CDR-L1 as depicted in SEQ ID NO: 565, CDR-L2 as depicted in SEQ ID NO: 566, CDR-L3 as depicted in SEQ ID NO: 567, CDR-H1 as depicted in SEQ ID NO: 568, CDR-H2 as depicted in SEQ ID NO: 569, and CDR-H3 as depicted in SEQ ID NO: 570;
(e) CDR-L1 as depicted in SEQ ID NO: 576, CDR-L2 as depicted in SEQ ID NO: 577, CDR-L3 as depicted in SEQ ID NO: 578, CDR-H1 as depicted in SEQ ID NO: 579, CDR-H2 as depicted in SEQ ID NO: 580, and CDR-H3 as depicted in SEQ ID NO: 581;
(f) CDR-L1 as depicted in SEQ ID NO: 588, CDR-L2 as depicted in SEQ ID NO: 589, CDR-L3 as depicted in SEQ ID NO: 590, CDR-H1 as depicted in SEQ ID NO: 591, CDR-H2 as depicted in SEQ ID NO: 592, and CDR-H3 as depicted in SEQ ID NO: 593;
(g) CDR-L1 as depicted in SEQ ID NO: 599, CDR-L2 as depicted in SEQ ID NO: 600, CDR-L3 as depicted in SEQ ID NO: 601, CDR-H1 as depicted in SEQ ID NO: 602, CDR-H2 as depicted in SEQ ID NO: 603, and CDR-H3 as depicted in SEQ ID NO: 604;
(h) CDR-L1 as depicted in SEQ ID NO: 610, CDR-L2 as depicted in SEQ ID NO: 611, CDR-L3 as depicted in SEQ ID NO: 612, CDR-H1 as depicted in SEQ ID NO: 613, CDR-H2 as depicted in SEQ ID NO: 614, and CDR-H3 as depicted in SEQ ID NO: 615;
(i) CDR-L1 as depicted in SEQ ID NO: 621, CDR-L2 as depicted in SEQ ID NO: 622, CDR-L3 as depicted in SEQ ID NO: 623, CDR-H1 as depicted in SEQ ID NO: 624, CDR-H2 as depicted in SEQ ID NO: 625, and CDR-H3 as depicted in SEQ ID NO: 626; and
(j) CDR-L1 as depicted in SEQ ID NO: 633, CDR-L2 as depicted in SEQ ID NO: 634, CDR-L3 as depicted in SEQ ID NO: 635, CDR-H1 as depicted in SEQ ID NO: 636, CDR-H2 as depicted in SEQ ID NO: 637, and CDR-H3 as depicted in SEQ ID NO: 638.

22. The method according to claim 1, wherein the second domain which binds to CD3 comprises a VL region having an amino acid sequence selected from the group consisting of those depicted in SEQ ID NO: 550, SEQ ID NO: 551, SEQ ID NO: 584, SEQ ID NO: 585, SEQ ID NO: 629 and SEQ ID NO: 630.

23. The method according to claim 1, wherein the second domain which binds to CD3 comprises a VH region having an amino acid sequence selected from the group consisting of those depicted in SEQ ID NO: 537, SEQ ID NO: 538, SEQ ID NO: 548, SEQ ID NO: 549, SEQ ID NO: 560, SEQ ID NO: 561, SEQ ID NO: 571, SEQ ID NO: 572, SEQ ID NO: 582, SEQ ID NO: 583, SEQ ID NO: 594, SEQ ID NO: 595, SEQ ID NO: 605, SEQ ID NO: 606, SEQ ID NO: 616, SEQ ID NO: 617, SEQ ID NO: 627, SEQ ID NO: 628, SEQ ID NO: 639, SEQ ID NO: 640, and SEQ ID NO: 644.

24. The method according to claim 1, wherein the second domain which binds to CD3 comprises a VL region and a VH region selected from the group consisting of:
(a) a VL region as depicted in SEQ ID NO: 539 or 521 and a VH region as depicted in SEQ ID NO: 537 or 538;
(b) a VL region as depicted in SEQ ID NO: 550 or 521 and a VH region as depicted in SEQ ID NO: 548 or 549;
(c) a VL region as depicted in SEQ ID NO: 562 or 521 and a VH region as depicted in SEQ ID NO: 560 or 561;
(d) a VL region as depicted in SEQ ID NO: 573 or 521 and a VH region as depicted in SEQ ID NO: 571 or 572;
(e) a VL region as depicted in SEQ ID NO: 584 or 585 and a VH region as depicted in SEQ ID NO: 582 or 583;
(f) a VL region as depicted in SEQ ID NO: 596 or 521 and a VH region as depicted in SEQ ID NO: 594 or 595;
(g) a VL region as depicted in SEQ ID NO: 607 or 585 and a VH region as depicted in SEQ ID NO: 605 or 606;
(h) a VL region as depicted in SEQ ID NO: 618 or 521 and a VH region as depicted in SEQ ID NO: 616 or 617;
(i) a VL region as depicted in SEQ ID NO: 629 or 630 and a VH region as depicted in SEQ ID NO: 627 or 628;
(j) a VL region as depicted in SEQ ID NO: 641 or 630 and a VH region as depicted in SEQ ID NO: 639 or 640; and
(k) a VL region as depicted in SEQ ID NO: 645 and a VH region as depicted in SEQ ID NO: 644.

25. The method according to claim 1, wherein the second domain which binds to CD3 comprises or consists of a polypeptide having an amino acid sequence selected from the group consisting of those depicted in SEQ ID NOs: 540, 541, 552, 553, 563, 564, 574, 575, 586, 587, 597, 598, 608, 609, 619, 620, 631, 632, 642, 643, and 646.

26. The method according to claim 1, wherein the antibody construct comprises a polypeptide having an amino acid sequence selected from the group consisting of those depicted in SEQ ID NOs: 10, 20, 30, 40, 50, 60, 70, 80, 90, 100, 110, 120, 130, 140, 150, 160, 170, 180, 190, 200, 210, 220, 230, 240, 250, 260, 270, 280, 290, 300, 310, 320, 330, 340, 350, 360, 370, 380, 390, 400, 410, 420, 430, 440, 450, 460, 470, 480, 490, 500, 510, 520, and 530.

27. The method according to claim 1, wherein the antibody construct comprises in an N- to C-terminal order:
(a) the first domain;
(b) a peptide linker having an amino acid sequence selected from the group consisting of SEQ ID NOs: 687, 693 and 694;
(c) the second domain;
(d) a peptide linker having an amino acid sequence selected from the group consisting of SEQ ID NO: 686, 687, 688, 689, 690, 691, 692, 693 or 694;
(e) a first polypeptide monomer (comprising a hinge, a CH2 domain and a CH3 domain);
(f) a peptide linker having an amino acid sequence selected from the group consisting of SEQ ID NOs: 695, 696, 697, 698 or 699; and
(g) a second polypeptide monomer (comprising a hinge, a CH2 domain and a CH3 domain).

28. The method according to claim 1, wherein the antibody construct comprises in an N- to C-terminal order:
(a) the first domain having an amino acid sequence selected from the group consisting of SEQ ID NOs: 9, 19, 29, 39, 49, 59, 69, 79, 89, 109, 129, 139, 149, 159, 169, 179, 189, 199, 209, 219, 229, 239, 249, 259, 269, 279, 289, 299, 309, 319, 329, 339, 349, 359, 369, 379, 389, 399, 409, 419, 429, 439, 449, 459, 469, 479, 489, 499, 519, and 529; wherein the peptide linker comprised within those sequences and having SEQ ID NO: 694 can be replaced by any one of SEQ ID NOs: 686-693 and 695-699;
(b) a peptide linker having an amino acid sequence selected from the group consisting of SEQ ID NOs: 687, 693 and 694;
(c) the second domain having an amino acid sequence selected from the group consisting of SEQ ID NOs: 540, 541, 552, 553, 563, 564, 574, 575, 586, 587, 597, 598, 608, 609, 619, 620, 631, 632, 642, 643, and 646; wherein the peptide linker comprised within those sequences and having SEQ ID NO: 694 can be replaced by any one of SEQ ID NOs: 686-693 and 695-699;
(d) a peptide linker having an amino acid sequence selected from the group consisting of SEQ ID NOs: 686, 687, 688, 689, 690, 691, 692, 693, and 694; and
(e) the third domain having an amino acid sequence selected from the group consisting of SEQ ID NOs: 700-707.

29. The method according to claim 1, wherein the antibody construct comprises in an N- to C-terminal order:
(a) a polypeptide having an amino acid sequence selected from the group consisting of those depicted in SEQ ID NOs: 10, 20, 30, 40, 50, 60, 70, 80, 90, 100, 110, 120, 130, 140, 150, 160, 170, 180, 190, 200, 210, 220, 230, 240, 250, 260, 270, 280, 290, 300, 310, 320, 330, 340, 350, 360, 370, 380, 390, 400, 410, 420, 430, 440, 450, 460, 470, 480, 490, 500, 510, 520, and 530;
(b) a linker having an amino acid sequence as depicted in SEQ ID NO: 686; and
(c) a polypeptide having an amino acid sequence as depicted in SEQ ID NO: 700.

30. The method according to claim 1, wherein the antibody construct has a molecular weight of about 75 to about 200 kDa, about 80 to about 175 kDa, about 85 to about 150 kDa, about 90 to about 130 kDa, about 95 to about 120 kDa, and preferably about 100 to about 115 kDa or about 105 to about 110 kDa.

31. The method according to claim 1, wherein the antibody construct has an elimination half-life (T_{1/2}) of about 3 to about 14 days, about 4 to about 12 days, about 3 or 4 to about 10 days, about 3 or 4 to about 8 days, or about 5 to about 7 days.

The application's sequence listing, which the Patent Office published only in electronic form, follows.

SEQUENCE LISTING (715 sequences)

SEQ ID NO: 1 - protein, 5 aa, Artificial Sequence
  Synthetic Polypeptide
NYDMA

SEQ ID NO: 2 - protein, 17 aa, Artificial Sequence
  Synthetic Polypeptide
SIITSGDATYYRDSVKG

SEQ ID NO: 3 - protein, 12 aa, Artificial Sequence
  Synthetic Polypeptide
HDYYDGSYGFAY

SEQ ID NO: 4 - protein, 11 aa, Artificial Sequence
  Synthetic Polypeptide
KASQSVGINVD

SEQ ID NO: 5 - protein, 7 aa, Artificial Sequence
  Synthetic Polypeptide
GASNRHT

SEQ ID NO: 6 - protein, 9 aa, Artificial Sequence
  Synthetic Polypeptide
LQYGSIPFT

SEQ ID NO: 7 - protein, 121 aa, Artificial Sequence
  Synthetic Polypeptide
QVQLVESGGGVVQPGRSLRLSCAASGFTFSNYDMAWVRQAPGKGLEWVASIITSGDATYYRDSVKGRFTISRDNSKNTLYLQMNSLRAEDTAVYYCVRHDYYDGSYGFAYWGQGTLVTVSS

SEQ ID NO: 8 - protein, 107 aa, Artificial Sequence
  Synthetic Polypeptide
EIVMTQSPATLSVSPGERVTLSCKASQSVGINVDWYQQKPGQAPRLLIYGASNRHTGIPARFSGSGSGREFTLTISSLQSEDFAVYYCLQYGSIPFTFGPGTKVDIK

SEQ ID NO: 9 - protein, 243 aa, Artificial Sequence
  Synthetic Polypeptide
QVQLVESGGGVVQPGRSLRLSCAASGFTFSNYDMAWVRQAPGKGLEWVASIITSGDATYYRDSVKGRFTISRDNSKNTLYLQMNSLRAEDTAVYYCVRHDYYDGSYGFAYWGQGTLVTVSSGGGGSGGGGSGGGGSEIVMTQSPATLSVSPGERVTLSCKASQSVGINVDWYQQKPGQAPRLLIYGASNRHTGIPARFSGSGSGREFTLTISSLQSEDFAVYYCLQYGSIPFTFGPGTKVDIK

SEQ ID NO: 10 - protein, 498 aa, Artificial Sequence
  Synthetic Polypeptide
QVQLVESGGGVVQPGRSLRLSCAASGFTFSNYDMAWVRQAPGKGLEWVASIITSGDATYYRDSVKGRFTISRDNSKNTLYLQMNSLRAEDTAVYYCVRHDYYDGSYGFAYWGQGTLVTVSSGGGGSGGGGSGGGGSEIVMTQSPATLSVSPGERVTLSCKASQSVGINVDWYQQKPGQAPRLLIYGASNRHTGIPARFSGSGSGREFTLTISSLQSEDFAVYYCLQYGSIPFTFGPGTKVDIKSGGGGSEVQLVESGGGLVQPGGSLKLSCAASGFTFNKYAMNWVRQAPGKGLEWVARIRSKYNNYATYYADSVKDRFTISRDDSKNTAYLQMNNLKTEDTAVYYCVRHGNFGNSYISYWAYWGQGTLVTVSSGGGGSGGGGSGGGGSQTVVTQEPSLTVSPGGTVTLTCGSSTGAVTSGNYPNWVQQKPGQAPRGLIGGTKFLAPGTPARFSGSLLGGKAALTLSGVQPEDEAEYYCVLWYSNRWVFGGGTKLTVL

SEQ ID NO: 11 - protein, 5 aa, Artificial Sequence
  Synthetic Polypeptide
NYDMA

SEQ ID NO: 12 - protein, 17 aa, Artificial Sequence
  Synthetic Polypeptide
SIITSGDMTYYRDSVKG

SEQ ID NO: 13 - protein, 12 aa, Artificial Sequence
  Synthetic Polypeptide
HDYYDGSYGFAY

SEQ ID NO: 14 - protein, 11 aa, Artificial Sequence
  Synthetic Polypeptide
KASQSVGINVD

SEQ ID NO: 15 - protein, 7 aa, Artificial Sequence
  Synthetic Polypeptide
GASNRHT

SEQ ID NO: 16 - protein, 9 aa, Artificial Sequence
  Synthetic Polypeptide
LQYGSIPFT

SEQ ID NO: 17 - protein, 121 aa, Artificial Sequence
  Synthetic Polypeptide
QVQLVESGGGVVQPGRSLRLSCAASGFTFSNYDMAWVRQAPGKGLEWVASIITSGDMTYYRDSVKGRFTISRDNSKNTLYLQMNSLRAEDTAVYYCVRHDYYDGSYGFAYWGQGTLVTVSS

SEQ ID NO: 18 - protein, 107 aa, Artificial Sequence; identical to SEQ ID NO: 8
  Synthetic Polypeptide

SEQ ID NO: 19 - protein, 243 aa, Artificial Sequence
  Synthetic Polypeptide
QVQLVESGGGVVQPGRSLRLSCAASGFTFSNYDMAWVRQAPGKGLEWVASIITSGDMTYYRDSVKGRFTISRDNSKNTLYLQMNSLRAEDTAVYYCVRHDYYDGSYGFAYWGQGTLVTVSSGGGGSGGGGSGGGGSEIVMTQSPATLSVSPGERVTLSCKASQSVGINVDWYQQKPGQAPRLLIYGASNRHTGIPARFSGSGSGREFTLTISSLQSEDFAVYYCLQYGSIPFTFGPGTKVDIK

SEQ ID NO: 20 - protein, 498 aa, Artificial Sequence
  Synthetic Polypeptide
QVQLVESGGGVVQPGRSLRLSCAASGFTFSNYDMAWVRQAPGKGLEWVASIITSGDMTYYRDSVKGRFTISRDNSKNTLYLQMNSLRAEDTAVYYCVRHDYYDGSYGFAYWGQGTLVTVSSGGGGSGGGGSGGGGSEIVMTQSPATLSVSPGERVTLSCKASQSVGINVDWYQQKPGQAPRLLIYGASNRHTGIPARFSGSGSGREFTLTISSLQSEDFAVYYCLQYGSIPFTFGPGTKVDIKSGGGGSEVQLVESGGGLVQPGGSLKLSCAASGFTFNKYAMNWVRQAPGKGLEWVARIRSKYNNYATYYADSVKDRFTISRDDSKNTAYLQMNNLKTEDTAVYYCVRHGNFGNSYISYWAYWGQGTLVTVSSGGGGSGGGGSGGGGSQTVVTQEPSLTVSPGGTVTLTCGSSTGAVTSGNYPNWVQQKPGQAPRGLIGGTKFLAPGTPARFSGSLLGGKAALTLSGVQPEDEAEYYCVLWYSNRWVFGGGTKLTVL

SEQ ID NO: 21 - protein, 5 aa, Artificial Sequence
  Synthetic Polypeptide
NYDMA

SEQ ID NO: 22 - protein, 17 aa, Artificial Sequence
  Synthetic Polypeptide
SIITSGDATYYRDSVKG

SEQ ID NO: 23 - protein, 12 aa, Artificial Sequence
  Synthetic Polypeptide
HDYYDGSYGFAY

SEQ ID NO: 24 - protein, 11 aa, Artificial Sequence
  Synthetic Polypeptide
KASQSVGINVD

SEQ ID NO: 25 - protein, 7 aa, Artificial Sequence
  Synthetic Polypeptide
GASNRHT

SEQ ID NO: 26 - protein, 9 aa, Artificial Sequence
  Synthetic Polypeptide
LQYGSIPFT

SEQ ID NO: 27 - protein, 121 aa, Artificial Sequence
  Synthetic Polypeptide
QVQLVESGGGVVQPGRSLRLSCAASGFTFSNYDMAWVRQAPGKGLEWVASIITSGDATYYRDSVKGRFTISRDNSKNTLYLQMNSLRSEDTAVYYCVRHDYYDGSYGFAYWGQGTLVTVSS

SEQ ID NO: 28 - protein, 107 aa, Artificial Sequence
  Synthetic Polypeptide
EIVMTQSPATLSVSPGERVTLSCKASQSVGINVDWYQQKPGQAPRLLIYGASNRHTGIPARFSGSGSGTEFTLTISSLQSEDFAVYYCLQYGSIPFTFGPGTKVDIK

SEQ ID NO: 29 - protein, 243 aa, Artificial Sequence
  Synthetic Polypeptide
QVQLVESGGGVVQPGRSLRLSCAASGFTFSNYDMAWVRQAPGKGLEWVASIITSGDATYYRDSVKGRFTISRDNSKNTLYLQMNSLRSEDTAVYYCVRHDYYDGSYGFAYWGQGTLVTVSSGGGGSGGGGSGGGGSEIVMTQSPATLSVSPGERVTLSCKASQSVGINVDWYQQKPGQAPRLLIYGASNRHTGIPARFSGSGSGTEFTLTISSLQSEDFAVYYCLQYGSIPFTFGPGTKVDIK

SEQ ID NO: 30 - protein, 498 aa, Artificial Sequence
  Synthetic Polypeptide
QVQLVESGGGVVQPGRSLRLSCAASGFTFSNYDMAWVRQAPGKGLEWVASIITSGDATYYRDSVKGRFTISRDNSKNTLYLQMNSLRSEDTAVYYCVRHDYYDGSYGFAYWGQGTLVTVSSGGGGSGGGGSGGGGSEIVMTQSPATLSVSPGERVTLSCKASQSVGINVDWYQQKPGQAPRLLIYGASNRHTGIPARFSGSGSGTEFTLTISSLQSEDFAVYYCLQYGSIPFTFGPGTKVDIKSGGGGSEVQLVESGGGLVQPGGSLKLSCAASGFTFNKYAMNWVRQAPGKGLEWVARIRSKYNNYATYYADSVKDRFTISRDDSKNTAYLQMNNLKTEDTAVYYCVRHGNFGNSYISYWAYWGQGTLVTVSSGGGGSGGGGSGGGGSQTVVTQEPSLTVSPGGTVTLTCGSSTGAVTSGNYPNWVQQKPGQAPRGLIGGTKFLAPGTPARFSGSLLGGKAALTLSGVQPEDEAEYYCVLWYSNRWVFGGGTKLTVL

SEQ ID NO: 31 - protein, 5 aa, Artificial Sequence
  Synthetic Polypeptide
NYDMA

SEQ ID NO: 32 - protein, 17 aa, Artificial Sequence
  Synthetic Polypeptide
SIITSGDMTYYRDSVKG

SEQ ID NO: 33 - protein, 12 aa, Artificial Sequence
  Synthetic Polypeptide
HDYYDGSYGFAY

SEQ ID NO: 34 - protein, 11 aa, Artificial Sequence
  Synthetic Polypeptide
KASQSVGINVD

SEQ ID NO: 35 - protein, 7 aa, Artificial Sequence
  Synthetic Polypeptide
GASNRHT

SEQ ID NO: 36 - protein, 9 aa, Artificial Sequence
  Synthetic Polypeptide
LQYGSIPFT

SEQ ID NO: 37 - protein, 121 aa, Artificial Sequence
  Synthetic Polypeptide
QVQLVESGGGVVQPGRSLRLSCAASGFTFSNYDMAWVRQAPGKGLEWVASIITSGDMTYYRDSVKGRFTISRDNSKNTLYLQMNSLRSEDTAVYYCVRHDYYDGSYGFAYWGQGTLVTVSS

SEQ ID NO: 38 - protein, 107 aa, Artificial Sequence; identical to SEQ ID NO: 28
  Synthetic Polypeptide

SEQ ID NO: 39 - protein, 243 aa, Artificial Sequence
  Synthetic Polypeptide
QVQLVESGGGVVQPGRSLRLSCAASGFTFSNYDMAWVRQAPGKGLEWVASIITSGDMTYYRDSVKGRFTISRDNSKNTLYLQMNSLRSEDTAVYYCVRHDYYDGSYGFAYWGQGTLVTVSSGGGGSGGGGSGGGGSEIVMTQSPATLSVSPGERVTLSCKASQSVGINVDWYQQKPGQAPRLLIYGASNRHTGIPARFSGSGSGTEFTLTISSLQSEDFAVYYCLQYGSIPFTFGPGTKVDIK

SEQ ID NO: 40 - protein, 498 aa, Artificial Sequence
  Synthetic Polypeptide
QVQLVESGGGVVQPGRSLRLSCAASGFTFSNYDMAWVRQAPGKGLEWVASIITSGDMTYYRDSVKGRFTISRDNSKNTLYLQMNSLRSEDTAVYYCVRHDYYDGSYGFAYWGQGTLVTVSSGGGGSGGGGSGGGGSEIVMTQSPATLSVSPGERVTLSCKASQSVGINVDWYQQKPGQAPRLLIYGASNRHTGIPARFSGSGSGTEFTLTISSLQSEDFAVYYCLQYGSIPFTFGPGTKVDIKSGGGGSEVQLVESGGGLVQPGGSLKLSCAASGFTFNKYAMNWVRQAPGKGLEWVARIRSKYNNYATYYADSVKDRFTISRDDSKNTAYLQMNNLKTEDTAVYYCVRHGNFGNSYISYWAYWGQGTLVTVSSGGGGSGGGGSGGGGSQTVVTQEPSLTVSPGGTVTLTCGSSTGAVTSGNYPNWVQQKPGQAPRGLIGGTKFLAPGTPARFSGSLLGGKAALTLSGVQPEDEAEYYCVLWYSNRWVFGGGTKLTVL

SEQ ID NO: 41 - protein, 5 aa, Artificial Sequence
  Synthetic Polypeptide
NYDMA

SEQ ID NO: 42 - protein, 17 aa, Artificial Sequence
  Synthetic Polypeptide
SIITSGDATYYRDSVKG

SEQ ID NO: 43 - protein, 12 aa, Artificial Sequence
  Synthetic Polypeptide
HDYYDGSYGFAY

SEQ ID NO: 44 - protein, 11 aa, Artificial Sequence
  Synthetic Polypeptide
KASQSVGINVD

SEQ ID NO: 45 - protein, 7 aa, Artificial Sequence
  Synthetic Polypeptide
GASNRHT

SEQ ID NO: 46 - protein, 9 aa, Artificial Sequence
  Synthetic Polypeptide
LQYGSIPFT

SEQ ID NO: 47 - protein, 121 aa, Artificial Sequence
  Synthetic Polypeptide
QVQLVESGGGVVQPGRSLRLSCAASGFTFSNYDMAWVRQAPGKGLEWVASIITSGDATYYRDSVKGRFTISRDNAKNTLYLQMNSLRAEDTAVYYCVRHDYYDGSYGFAYWGQGTLVTVSS

SEQ ID NO: 48 - protein, 107 aa, Artificial Sequence
  Synthetic Polypeptide
EIVMTQSPASMSVSPGERATLSCKASQSVGINVDWYQQKPGQAPRLLIYGASNRHTGIPARFSGSGSGTEFTLTISSLQSEDFAVYYCLQYGSIPFTFGPGTKVDIK

SEQ ID NO: 49 - protein, 243 aa, Artificial Sequence
  Synthetic Polypeptide
QVQLVESGGGVVQPGRSLRLSCAASGFTFSNYDMAWVRQAPGKGLEWVASIITSGDATYYRDSVKGRFTISRDNAKNTLYLQMNSLRAEDTAVYYCVRHDYYDGSYGFAYWGQGTLVTVSSGGGGSGGGGSGGGGSEIVMTQSPASMSVSPGERATLSCKASQSVGINVDWYQQKPGQAPRLLIYGASNRHTGIPARFSGSGSGTEFTLTISSLQSEDFAVYYCLQYGSIPFTFGPGTKVDIK

SEQ ID NO: 50 - protein, 498 aa, Artificial Sequence
  Synthetic Polypeptide
QVQLVESGGGVVQPGRSLRLSCAASGFTFSNYDMAWVRQAPGKGLEWVASIITSGDATYYRDSVKGRFTISRDNAKNTLYLQMNSLRAEDTAVYYCVRHDYYDGSYGFAYWGQGTLVTVSSGGGGSGGGGSGGGGSEIVMTQSPASMSVSPGERATLSCKASQSVGINVDWYQQKPGQAPRLLIYGASNRHTGIPARFSGSGSGTEFTLTISSLQSEDFAVYYCLQYGSIPFTFGPGTKVDIKSGGGGSEVQLVESGGGLVQPGGSLKLSCAASGFTFNKYAMNWVRQAPGKGLEWVARIRSKYNNYATYYADSVKDRFTISRDDSKNTAYLQMNNLKTEDTAVYYCVRHGNFGNSYISYWAYWGQGTLVTVSSGGGGSGGGGSGGGGSQTVVTQEPSLTVSPGGTVTLTCGSSTGAVTSGNYPNWVQQKPGQAPRGLIGGTKFLAPGTPARFSGSLLGGKAALTLSGVQPEDEAEYYCVLWYSNRWVFGGGTKLTVL

SEQ ID NO: 51 - protein, 5 aa, Artificial Sequence
  Synthetic Polypeptide
NYDMA

SEQ ID NO: 52 - protein, 17 aa, Artificial Sequence
  Synthetic Polypeptide
SIITSGDMTYYRDSVKG

SEQ ID NO: 53 - protein, 12 aa, Artificial Sequence
  Synthetic Polypeptide
HDYYDGSYGFAY

SEQ ID NO: 54 - protein, 11 aa, Artificial Sequence
  Synthetic Polypeptide
KASQSVGINVD

SEQ ID NO: 55 - protein, 7 aa, Artificial Sequence
  Synthetic Polypeptide
GASNRHT

SEQ ID NO: 56 - protein, 9 aa, Artificial Sequence
  Synthetic Polypeptide
LQYGSIPFT

SEQ ID NO: 57 - protein, 121 aa, Artificial Sequence
  Synthetic Polypeptide
QVQLVESGGGVVQPGRSLRLSCAASGFTFSNYDMAWVRQAPGKGLEWVASIITSGDMTYYRDSVKGRFTISRDNAKNTLYLQMNSLRAEDTAVYYCVRHDYYDGSYGFAYWGQGTLVTVSS

SEQ ID NO: 58 - protein, 107 aa, Artificial Sequence; identical to SEQ ID NO: 48
  Synthetic Polypeptide

SEQ ID NO: 59 - protein, 243 aa, Artificial Sequence
  Synthetic Polypeptide
QVQLVESGGGVVQPGRSLRLSCAASGFTFSNYDMAWVRQAPGKGLEWVASIITSGDMTYYRDSVKGRFTISRDNAKNTLYLQMNSLRAEDTAVYYCVRHDYYDGSYGFAYWGQGTLVTVSSGGGGSGGGGSGGGGSEIVMTQSPASMSVSPGERATLSCKASQSVGINVDWYQQKPGQAPRLLIYGASNRHTGIPARFSGSGSGTEFTLTISSLQSEDFAVYYCLQYGSIPFTFGPGTKVDIK

SEQ ID NO: 60 - protein, 498 aa, Artificial Sequence
  Synthetic Polypeptide
QVQLVESGGGVVQPGRSLRLSCAASGFTFSNYDMAWVRQAPGKGLEWVASIITSGDMTYYRDSVKGRFTISRDNAKNTLYLQMNSLRAEDTAVYYCVRHDYYDGSYGFAYWGQGTLVTVSSGGGGSGGGGSGGGGSEIVMTQSPASMSVSPGERATLSCKASQSVGINVDWYQQKPGQAPRLLIYGASNRHTGIPARFSGSGSGTEFTLTISSLQSEDFAVYYCLQYGSIPFTFGPGTKVDIKSGGGGSEVQLVESGGGLVQPGGSLKLSCAASGFTFNKYAMNWVRQAPGKGLEWVARIRSKYNNYATYYADSVKDRFTISRDDSKNTAYLQMNNLKTEDTAVYYCVRHGNFGNSYISYWAYWGQGTLVTVSSGGGGSGGGGSGGGGSQTVVTQEPSLTVSPGGTVTLTCGSSTGAVTSGNYPNWVQQKPGQAPRGLIGGTKFLAPGTPARFSGSLLGGKAALTLSGVQPEDEAEYYCVLWYSNRWVFGGGTKLTVL

SEQ ID NO: 61 - protein, 5 aa, Artificial Sequence
  Synthetic Polypeptide
NYDMA

SEQ ID NO: 62 - protein, 17 aa, Artificial Sequence
  Synthetic Polypeptide
SIITSGDATYYRDSVKG

SEQ ID NO: 63 - protein, 12 aa, Artificial Sequence
  Synthetic Polypeptide
HDYYDGSYGFAY

SEQ ID NO: 64 - protein, 11 aa, Artificial Sequence
  Synthetic Polypeptide
KASQSVGINVD

SEQ ID NO: 65 - protein, 7 aa, Artificial Sequence
  Synthetic Polypeptide
GASNRHT

SEQ ID NO: 66 - protein, 9 aa, Artificial Sequence
  Synthetic Polypeptide
LQYGSIPFT

SEQ ID NO: 67 - protein, 121 aa, Artificial Sequence
  Synthetic Polypeptide
QVQLVESGGGVVQPGRSLRLSCAASGFTFSNYDMAWVRQAPGKGLEWVASIITSGDATYYRDSVKGRFTVSRDNSKNTLYLQMNSLRAEDTAVYYCVRHDYYDGSYGFAYWGQGTLVTVSS

SEQ ID NO: 68 - protein, 107 aa, Artificial Sequence
  Synthetic Polypeptide
EIVMTQSPATLSVSPGERATLSCKASQSVGINVDWYQQKPGQAPRLLIYGASNRHTGIPARFSGSGSGTEFTLTISSLQAEDFAVYYCLQYGSIPFTFGPGTKVDIK

SEQ ID NO: 69 - protein, 243 aa, Artificial Sequence
  Synthetic Polypeptide
QVQLVESGGGVVQPGRSLRLSCAASGFTFSNYDMAWVRQAPGKGLEWVASIITSGDATYYRDSVKGRFTVSRDNSKNTLYLQMNSLRAEDTAVYYCVRHDYYDGSYGFAYWGQGTLVTVSSGGGGSGGGGSGGGGSEIVMTQSPATLSVSPGERATLSCKASQSVGINVDWYQQKPGQAPRLLIYGASNRHTGIPARFSGSGSGTEFTLTISSLQAEDFAVYYCLQYGSIPFTFGPGTKVDIK

SEQ ID NO: 70 - protein, 498 aa, Artificial Sequence
  Synthetic Polypeptide
QVQLVESGGGVVQPGRSLRLSCAASGFTFSNYDMAWVRQAPGKGLEWVASIITSGDATYYRDSVKGRFTVSRDNSKNTLYLQMNSLRAEDTAVYYCVRHDYYDGSYGFAYWGQGTLVTVSSGGGGSGGGGSGGGGSEIVMTQSPATLSVSPGERATLSCKASQSVGINVDWYQQKPGQAPRLLIYGASNRHTGIPARFSGSGSGTEFTLTISSLQAEDFAVYYCLQYGSIPFTFGPGTKVDIKSGGGGSEVQLVESGGGLVQPGGSLKLSCAASGFTFNKYAMNWVRQAPGKGLEWVARIRSKYNNYATYYADSVKDRFTISRDDSKNTAYLQMNNLKTEDTAVYYCVRHGNFGNSYISYWAYWGQGTLVTVSSGGGGSGGGGSGGGGSQTVVTQEPSLTVSPGGTVTLTCGSSTGAVTSGNYPNWVQQKPGQAPRGLIGGTKFLAPGTPARFSGSLLGGKAALTLSGVQPEDEAEYYCVLWYSNRWVFGGGTKLTVL

SEQ ID NO: 71 - protein, 5 aa, Artificial Sequence
  Synthetic Polypeptide
NYDMA

SEQ ID NO: 72 - protein, 17 aa, Artificial Sequence
  Synthetic Polypeptide
SIITSGDMTYYRDSVKG

SEQ ID NO: 73 - protein, 12 aa, Artificial Sequence
  Synthetic Polypeptide
HDYYDGSYGFAY

SEQ ID NO: 74 - protein, 11 aa, Artificial Sequence
  Synthetic Polypeptide
KASQSVGINVD

SEQ ID NO: 75 - protein, 7 aa, Artificial Sequence
  Synthetic Polypeptide
GASNRHT

SEQ ID NO: 76 - protein, 9 aa, Artificial Sequence
  Synthetic Polypeptide
LQYGSIPFT

SEQ ID NO: 77 - protein, 121 aa, Artificial Sequence
  Synthetic Polypeptide
QVQLVESGGGVVQPGRSLRLSCAASGFTFSNYDMAWVRQAPGKGLEWVASIITSGDMTYYRDSVKGRFTVSRDNSKNTLYLQMNSLRAEDTAVYYCVRHDYYDGSYGFAYWGQGTLVTVSS

SEQ ID NO: 78 - protein, 107 aa, Artificial Sequence; identical to SEQ ID NO: 68
  Synthetic Polypeptide

SEQ ID NO: 79 - protein, 243 aa, Artificial Sequence
  Synthetic Polypeptide
QVQLVESGGGVVQPGRSLRLSCAASGFTFSNYDMAWVRQAPGKGLEWVASIITSGDMTYYRDSVKGRFTVSRDNSKNTLYLQMNSLRAEDTAVYYCVRHDYYDGSYGFAYWGQGTLVTVSSGGGGSGGGGSGGGGSEIVMTQSPATLSVSPGERATLSCKASQSVGINVDWYQQKPGQAPRLLIYGASNRHTGIPARFSGSGSGTEFTLTISSLQAEDFAVYYCLQYGSIPFTFGPGTKVDIK

SEQ ID NO: 80 - protein, 498 aa, Artificial Sequence
  Synthetic Polypeptide
QVQLVESGGGVVQPGRSLRLSCAASGFTFSNYDMAWVRQAPGKGLEWVASIITSGDMTYYRDSVKGRFTVSRDNSKNTLYLQMNSLRAEDTAVYYCVRHDYYDGSYGFAYWGQGTLVTVSSGGGGSGGGGSGGGGSEIVMTQSPATLSVSPGERATLSCKASQSVGINVDWYQQKPGQAPRLLIYGASNRHTGIPARFSGSGSGTEFTLTISSLQAEDFAVYYCLQYGSIPFTFGPGTKVDIKSGGGGSEVQLVESGGGLVQPGGSLKLSCAASGFTFNKYAMNWVRQAPGKGLEWVARIRSKYNNYATYYADSVKDRFTISRDDSKNTAYLQMNNLKTEDTAVYYCVRHGNFGNSYISYWAYWGQGTLVTVSSGGGGSGGGGSGGGGSQTVVTQEPSLTVSPGGTVTLTCGSSTGAVTSGNYPNWVQQKPGQAPRGLIGGTKFLAPGTPARFSGSLLGGKAALTLSGVQPEDEAEYYCVLWYSNRWVFGGGTKLTVL

SEQ ID NO: 81 - protein, 5 aa, Artificial Sequence
  Synthetic Polypeptide
NFDMA

SEQ ID NO: 82 - protein, 17 aa, Artificial Sequence
  Synthetic Polypeptide
SITTGADHAIYADSVKG

SEQ ID NO: 83 - protein, 12 aa, Artificial Sequence
  Synthetic Polypeptide
HGYYDGYHLFDY

SEQ ID NO: 84 - protein, 11 aa, Artificial Sequence
  Synthetic Polypeptide
RASQGISNYLN

SEQ ID NO: 85 - protein, 7 aa, Artificial Sequence
  Synthetic Polypeptide
YTSNLQS

SEQ ID NO: 86 - protein, 9 aa, Artificial Sequence
  Synthetic Polypeptide
QQYDISSYT

SEQ ID NO: 87 - protein, 121 aa, Artificial Sequence
  Synthetic Polypeptide
EVQLVESGGGLVQPGGSLRLSCAASGFTFSNFDMAWVRQAPGKGLVWVSSITTGADHAIYADSVKGRFTISRDNAKNTLYLQMDSLRAEDTAVYYCVRHGYYDGYHLFDYWGQGTLVTVSS

SEQ ID NO: 88 - protein, 107 aa, Artificial Sequence
  Synthetic Polypeptide
DIQMTQSPSSLSASVGDRVTITCRASQGISNYLNWYQQKPGKAPKPLIYYTSNLQSGVPSRFSGSGSGTDYTLTISSLQPEDFATYYCQQYDISSYTFGQGTKLEIK

SEQ ID NO: 89 - protein, 243 aa, Artificial Sequence
  Synthetic Polypeptide
EVQLVESGGGLVQPGGSLRLSCAASGFTFSNFDMAWVRQAPGKGLVWVSSITTGADHAIYADSVKGRFTISRDNAKNTLYLQMDSLRAEDTAVYYCVRHGYYDGYHLFDYWGQGTLVTVSSGGGGSGGGGSGGGGSDIQMTQSPSSLSASVGDRVTITCRASQGISNYLNWYQQKPGKAPKPLIYYTSNLQSGVPSRFSGSGSGTDYTLTISSLQPEDFATYYCQQYDISSYTFGQGTKLEIK

SEQ ID NO: 90 - protein, 498 aa, Artificial Sequence
  Synthetic Polypeptide
EVQLVESGGGLVQPGGSLRLSCAASGFTFSNFDMAWVRQAPGKGLVWVSSITTGADHAIYADSVKGRFTISRDNAKNTLYLQMDSLRAEDTAVYYCVRHGYYDGYHLFDYWGQGTLVTVSSGGGGSGGGGSGGGGSDIQMTQSPSSLSASVGDRVTITCRASQGISNYLNWYQQKPGKAPKPLIYYTSNLQSGVPSRFSGSGSGTDYTLTISSLQPEDFATYYCQQYDISSYTFGQGTKLEIKSGGGGSEVQLVESGGGLVQPGGSLKLSCAASGFTFNKYAMNWVRQAPGKGLEWVARIRSKYNNYATYYADSVKDRFTISRDDSKNTAYLQMNNLKTEDTAVYYCVRHGNFGNSYISYWAYWGQGTLVTVSSGGGGSGGGGSGGGGSQTVVTQEPSLTVSPGGTVTLTCGSSTGAVTSGNYPNWVQQKPGQAPRGLIGGTKFLAPGTPARFSGSLLGGKAALTLSGVQPEDEAEYYCVLWYSNRWVFGGGTKLTVL

SEQ ID NO: 91 - protein, 5 aa, Artificial Sequence
  Synthetic Polypeptide
NFDMA

SEQ ID NO: 92 - protein, 17 aa, Artificial Sequence
  Synthetic Polypeptide
SITTGADHAIYADSVKG

SEQ ID NO: 93 - protein, 12 aa, Artificial Sequence
  Synthetic Polypeptide
HGYYDGYHLFDY

SEQ ID NO: 94 - protein, 11 aa, Artificial Sequence
  Synthetic Polypeptide
RASQGISNYLN

SEQ ID NO: 95 - protein, 7 aa, Artificial Sequence
  Synthetic Polypeptide
YTSNLQS

SEQ ID NO: 96 - protein, 9 aa, Artificial Sequence
  Synthetic Polypeptide
MGQTISSYT

SEQ ID NO: 97 - protein, 121 aa, Artificial Sequence; identical to SEQ ID NO: 87
  Synthetic Polypeptide

SEQ ID NO: 98 - protein, 107 aa, Artificial Sequence
  Synthetic Polypeptide
DIQMTQSPSSLSASVGDRVTITCRASQGISNYLNWYQQKPGKAPKPLIYYTSNLQSGVPSRFSGSGSGTDYTLTISSLQPEDFATYYCMGQTISSYTFGQGTKLEIK

SEQ ID NO: 99 - protein, 243 aa, Artificial Sequence
  Synthetic Polypeptide
EVQLVESGGGLVQPGGSLRLSCAASGFTFSNFDMAWVRQAPGKGLVWVSSITTGADHAIYADSVKGRFTISRDNAKNTLYLQMDSLRAEDTAVYYCVRHGYYDGYHLFDYWGQGTLVTVSSGGGGSGGGGSGGGGSDIQMTQSPSSLSASVGDRVTITCRASQGISNYLNWYQQKPGKAPKPLIYYTSNLQSGVPSRFSGSGSGTDYTLTISSLQPEDFATYYCMGQTISSYTFGQGTKLEIK

SEQ ID NO: 100 - protein, 498 aa, Artificial Sequence
  Synthetic Polypeptide
EVQLVESGGGLVQPGGSLRLSCAASGFTFSNFDMAWVRQAPGKGLVWVSSITTGADHAIYADSVKGRFTISRDNAKNTLYLQMDSLRAEDTAVYYCVRHGYYDGYHLFDYWGQGTLVTVSSGGGGSGGGGSGGGGSDIQMTQSPSSLSASVGDRVTITCRASQGISNYLNWYQQKPGKAPKPLIYYTSNLQSGVPSRFSGSGSGTDYTLTISSLQPEDFATYYCMGQTISSYTFGQGTKLEIKSGGGGSEVQLVESGGGLVQPGGSLKLSCAASGFTFNKYAMNWVRQAPGKGLEWVARIRSKYNNYATYYADSVKDRFTISRDDSKNTAYLQMNNLKTEDTAVYYCVRHGNFGNSYISYWAYWGQGTLVTVSSGGGGSGGGGSGGGGSQTVVTQEPSLTVSPGGTVTLTCGSSTGAVTSGNYPNWVQQKPGQAPRGLIGGTKFLAPGTPARFSGSLLGGKAALTLSGVQPEDEAEYYCVLWYSNRWVFGGGTKLTVL

SEQ ID NO: 101 - protein, 5 aa, Artificial Sequence
  Synthetic Polypeptide
NFDMA

SEQ ID NO: 102 - protein, 17 aa, Artificial Sequence
  Synthetic Polypeptide
SITTGADHAIYADSVKG

SEQ ID NO: 103 - protein, 12 aa, Artificial Sequence
  Synthetic Polypeptide
HGYYDGYHLFDY

SEQ ID NO: 104 - protein, 11 aa, Artificial Sequence
  Synthetic Polypeptide
RASQGISNYLN

SEQ ID NO: 105 - protein, 7 aa, Artificial Sequence
  Synthetic Polypeptide
YTSNLQS

SEQ ID NO: 106 - protein, 9 aa, Artificial Sequence
  Synthetic Polypeptide
QQYDISSYT

SEQ ID NO: 107 - protein, 121 aa, Artificial Sequence
  Synthetic Polypeptide
EVQLVESGGGLVQPGGSLRLSCAASGFTFSNFDMAWVRQAPGKGLVWVSSITTGADHAIYADSVKGRFTISRDNAKNTLYLQMNSLRAEDTAVYYCVRHGYYDGYHLFDYWGQGTLVTVSS

SEQ ID NO: 108 - protein, 107 aa, Artificial Sequence; identical to SEQ ID NO: 88
  Synthetic Polypeptide

SEQ ID NO: 109 - protein, 243 aa, Artificial Sequence
  Synthetic Polypeptide
EVQLVESGGGLVQPGGSLRLSCAASGFTFSNFDMAWVRQAPGKGLVWVSSITTGADHAIYADSVKGRFTISRDNAKNTLYLQMNSLRAEDTAVYYCVRHGYYDGYHLFDYWGQGTLVTVSSGGGGSGGGGSGGGGSDIQMTQSPSSLSASVGDRVTITCRASQGISNYLNWYQQKPGKAPKPLIYYTSNLQSGVPSRFSGSGSGTDYTLTISSLQPEDFATYYCQQYDISSYTFGQGTKLEIK

SEQ ID NO: 110 - protein, 498 aa, Artificial Sequence
  Synthetic Polypeptide
EVQLVESGGGLVQPGGSLRLSCAASGFTFSNFDMAWVRQAPGKGLVWVSSITTGADHAIYADSVKGRFTISRDNAKNTLYLQMNSLRAEDTAVYYCVRHGYYDGYHLFDYWGQGTLVTVSSGGGGSGGGGSGGGGSDIQMTQSPSSLSASVGDRVTITCRASQGISNYLNWYQQKPGKAPKPLIYYTSNLQSGVPSRFSGSGSGTDYTLTISSLQPEDFATYYCQQYDISSYTFGQGTKLEIKSGGGGSEVQLVESGGGLVQPGGSLKLSCAASGFTFNKYAMNWVRQAPGKGLEWVARIRSKYNNYATYYADSVKDRFTISRDDSKNTAYLQMNNLKTEDTAVYYCVRHGNFGNSYISYWAYWGQGTLVTVSSGGGGSGGGGSGGGGSQTVVTQEPSLTVSPGGTVTLTCGSSTGAVTSGNYPNWVQQKPGQAPRGLIGGTKFLAPGTPARFSGSLLGGKAALTLSGVQPEDEAEYYCVLWYSNRWVFGGGTKLTVL

SEQ ID NO: 111 - protein, 5 aa, Artificial Sequence
  Synthetic Polypeptide
NFDMA

SEQ ID NO: 112 - protein, 17 aa, Artificial Sequence
  Synthetic Polypeptide
SITTGADHAIYADSVKG

SEQ ID NO: 113 - protein, 12 aa, Artificial Sequence
  Synthetic Polypeptide
HGYYDGYHLFDY

SEQ ID NO: 114 - protein, 11 aa, Artificial Sequence
  Synthetic Polypeptide
RASQGISNYLN

SEQ ID NO: 115 - protein, 7 aa, Artificial Sequence
  Synthetic Polypeptide
YTSNLQS

SEQ ID NO: 116 - protein, 9 aa, Artificial Sequence
  Synthetic Polypeptide
MGQTISSYT

SEQ ID NO: 117 - protein, 121 aa, Artificial Sequence; identical to SEQ ID NO: 107
  Synthetic Polypeptide

SEQ ID NO: 118 - protein, 107 aa, Artificial Sequence; identical to SEQ ID NO: 98
  Synthetic Polypeptide

SEQ ID NO: 119 - protein, 243 aa, Artificial Sequence
  Synthetic Polypeptide
EVQLVESGGGLVQPGGSLRLSCAASGFTFSNFDMAWVRQAPGKGLVWVSSITTGADHAIYADSVKGRFTISRDNAKNTLYLQMNSLRAEDTAVYYCVRHGYYDGYHLFDYWGQGTLVTVSSGGGGSGGGGSGGGGSDIQMTQSPSSLSASVGDRVTITCRASQGISNYLNWYQQKPGKAPKPLIYYTSNLQSGVPSRFSGSGSGTDYTLTISSLQPEDFATYYCMGQTISSYTFGQGTKLEIK

SEQ ID NO: 120 - protein, 498 aa, Artificial Sequence
  Synthetic Polypeptide
EVQLVESGGGLVQPGGSLRLSCAASGFTFSNFDMAWVRQAPGKGLVWVSSITTGADHAIYADSVKGRFTISRDNAKNTLYLQMNSLRAEDTAVYYCVRHGYYDGYHLFDYWGQGTLVTVSSGGGGSGGGGSGGGGSDIQMTQSPSSLSASVGDRVTITCRASQGISNYLNWYQQKPGKAPKPLIYYTSNLQSGVPSRFSGSGSGTDYTLTISSLQPEDFATYYCMGQTISSYTFGQGTKLEIKSGGGGSEVQLVESGGGLVQPGGSLKLSCAASGFTFNKYAMNWVRQAPGKGLEWVARIRSKYNNYATYYADSVKDRFTISRDDSKNTAYLQMNNLKTEDTAVYYCVRHGNFGNSYISYWAYWGQGTLVTVSSGGGGSGGGGSGGGGSQTVVTQEPSLTVSPGGTVTLTCGSSTGAVTSGNYPNWVQQKPGQAPRGLIGGTKFLAPGTPARFSGSLLGGKAALTLSGVQPEDEAEYYCVLWYSNRWVFGGGTKLTVL

SEQ ID NO: 121 - protein, 5 aa, Artificial Sequence
  Synthetic Polypeptide
NFDMA

SEQ ID NO: 122 - protein, 17 aa, Artificial Sequence
  Synthetic Polypeptide
SITTGADHAIYADSVKG

SEQ ID NO: 123 - protein, 12 aa, Artificial Sequence
  Synthetic Polypeptide
HGYYDGYHLFDY

SEQ ID NO: 124 - protein, 11 aa, Artificial Sequence
  Synthetic Polypeptide
RASQGISNYLN

SEQ ID NO: 125 - protein, 7 aa, Artificial Sequence
  Synthetic Polypeptide
YTSNLQS

SEQ ID NO: 126 - protein, 9 aa, Artificial Sequence
  Synthetic Polypeptide
QQYDISSYT

SEQ ID NO: 127 - protein, 121 aa, Artificial Sequence
  Synthetic Polypeptide
EVQLVESGGGLVQPGGSLRLSCAASGFTFSNFDMAWVRQAPGKGLVWVSSITTGADHAIYADSVKGRFTISRDNAKNTLYLQMDSLRSEDTAVYYCVRHGYYDGYHLFDYWGQGTLVTVSS

SEQ ID NO: 128 - protein, 107 aa, Artificial Sequence
  Synthetic Polypeptide
DIQMTQSPSSLSASVGDRVTISCRASQGISNYLNWYQQKPGKAPKPLIYYTSNLQSGVPSRFSGSGSGTDYTLTISSLQPEDFATYYCQQYDISSYTFGQGTKLEIK

SEQ ID NO: 129 - protein, 243 aa, Artificial Sequence
  Synthetic Polypeptide
EVQLVESGGGLVQPGGSLRLSCAASGFTFSNFDMAWVRQAPGKGLVWVSSITTGADHAIYADSVKGRFTISRDNAKNTLYLQMDSLRSEDTAVYYCVRHGYYDGYHLFDYWGQGTLVTVSSGGGGSGGGGSGGGGSDIQMTQSPSSLSASVGDRVTISCRASQGISNYLNWYQQKPGKAPKPLIYYTSNLQSGVPSRFSGSGSGTDYTLTISSLQPEDFATYYCQQYDISSYTFGQGTKLEIK

SEQ ID NO: 130 - protein, 498 aa, Artificial Sequence
  Synthetic Polypeptide
EVQLVESGGGLVQPGGSLRLSCAASGFTFSNFDMAWVRQAPGKGLVWVSSITTGADHAIYADSVKGRFTISRDNAKNTLYLQMDSLRSEDTAVYYCVRHGYYDGYHLFDYWGQGTLVTVSSGGGGSGGGGSGGGGSDIQMTQSPSSLSASVGDRVTISCRASQGISNYLNWYQQKPGKAPKPLIYYTSNLQSGVPSRFSGSGSGTDYTLTISSLQPEDFATYYCQQYDISSYTFGQGTKLEIKSGGGGSEVQLVESGGGLVQPGGSLKLSCAASGFTFNKYAMNWVRQAPGKGLEWVARIRSKYNNYATYYADSVKDRFTISRDDSKNTAYLQMNNLKTEDTAVYYCVRHGNFGNSYISYWAYWGQGTLVTVSSGGGGSGGGGSGGGGSQTVVTQEPSLTVSPGGTVTLTCGSSTGAVTSGNYPNWVQQKPGQAPRGLIGGTKFLAPGTPARFSGSLLGGKAALTLSGVQPEDEAEYYCVLWYSNRWVFGGGTKLTVL

SEQ ID NO: 131 - protein, 5 aa, Artificial Sequence
  Synthetic Polypeptide
NFDMA

SEQ ID NO: 132 - protein, 17 aa, Artificial Sequence
  Synthetic Polypeptide
SITTGADHAIYAESVKG

SEQ ID NO: 133 - protein, 12 aa, Artificial Sequence
  Synthetic Polypeptide
HGYYDGYHLFDY

SEQ ID NO: 134 - protein, 11 aa, Artificial Sequence
  Synthetic Polypeptide
RASQGISNYLN

SEQ ID NO: 135 - protein, 7 aa, Artificial Sequence
  Synthetic Polypeptide
YTSNLQS

SEQ ID NO: 136 - protein, 9 aa, Artificial Sequence
  Synthetic Polypeptide
MGQTISSYT

SEQ ID NO: 137 - protein, 121 aa, Artificial Sequence
  Synthetic Polypeptide
EVQLVESGGGLVQPGGSLRLSCAASGFTFSNFDMAWVRQAPGKGLVWVSSITTGADHAIYAESVKGRFTISRDNAKNTLYLQMDSLRSEDTAVYYCVRHGYYDGYHLFDYWGQGTLVTVSS

SEQ ID NO: 138 - protein, 107 aa, Artificial Sequence
  Synthetic Polypeptide
DIQMTQSPSSLSASVGDRVTISCRASQGISNYLNWYQQKPGKAPKPLIYYTSNLQSGVPSRFSGSGSGTDYTLTISSLQPEDFATYYCMGQTISSYTFGQGTKLEIK

SEQ ID NO: 139 - protein, 243 aa, Artificial Sequence
  Synthetic Polypeptide
EVQLVESGGGLVQPGGSLRLSCAASGFTFSNFDMAWVRQAPGKGLVWVSSITTGADHAIYAESVKGRFTISRDNAKNTLYLQMDSLRSEDTAVYYCVRHGYYDGYHLFDYWGQGTLVTVSSGGGGSGGGGSGGGGSDIQMTQSPSSLSASVGDRVTISCRASQGISNYLNWYQQKPGKAPKPLIYYTSNLQSGVPSRFSGSGSGTDYTLTISSLQPEDFATYYCMGQTISSYTFGQGTKLEIK

SEQ ID NO: 140 - protein, 498 aa, Artificial Sequence
  Synthetic Polypeptide
EVQLVESGGGLVQPGGSLRLSCAASGFTFSNFDMAWVRQAPGKGLVWVSSITTGADHAIYAESVKGRFTISRDNAKNTLYLQMDSLRSEDTAVYYCVRHGYYDGYHLFDYWGQGTLVTVSSGGGGSGGGGSGGGGSDIQMTQSPSSLSASVGDRVTISCRASQGISNYLNWYQQKPGKAPKPLIYYTSNLQSGVPSRFSGSGSGTDYTLTISSLQPEDFATYYCMGQTISSYTFGQGTKLEIKSGGGGSEVQLVESGGGLVQPGGSLKLSCAASGFTFNKYAMNWVRQAPGKGLEWVARIRSKYNNYATYYADSVKDRFTISRDDSKNTAYLQMNNLKTEDTAVYYCVRHGNFGNSYISYWAYWGQGTLVTVSSGGGGSGGGGSGGGGSQTVVTQEPSLTVSPGGTVTLTCGSSTGAVTSGNYPNWVQQKPGQAPRGLIGGTKFLAPGTPARFSGSLLGGKAALTLSGVQPEDEAEYYCVLWYSNRWVFGGGTKLTVL

SEQ ID NO: 141 - protein, 5 aa, Artificial Sequence
  Synthetic Polypeptide
NFDMA

SEQ ID NO: 142 - protein, 17 aa, Artificial Sequence
  Synthetic Polypeptide
SITTGADHAIYADSVKG

SEQ ID NO: 143 - protein, 12 aa, Artificial Sequence
  Synthetic Polypeptide
HGYYDGYHLFDY

SEQ ID NO: 144 - protein, 11 aa, Artificial Sequence
  Synthetic Polypeptide
RASQGISNYLN

SEQ ID NO: 145 - protein, 7 aa, Artificial Sequence
  Synthetic Polypeptide
YTSNLQS

SEQ ID NO: 146 - protein, 9 aa, Artificial Sequence
  Synthetic Polypeptide
MGQTISSYT

SEQ ID NO: 147 - protein, 121 aa, Artificial Sequence
  Synthetic Polypeptide
EVQLVESGGGLVQPGRSLRLSCAASGFTFSNFDMAWVRQAPAKGLEWVSSITTGADHAIYADSVKGRFTISRDNAKNTLYLQMNSLRAEDTAVYYCVRHGYYDGYHLFDYWGQGTLVTVSS

SEQ ID NO: 148 - protein, 107 aa, Artificial Sequence
  Synthetic Polypeptide
DIQMTQSPSSLSASVGDRVTITCRASQGISNYLNWYQQKPGKAPKPLIYYTSNLQSGVPSRFSGSGSGTDFTLTISSLQPEDFATYYCMGQTISSYTFGQGTKLEIK

SEQ ID NO: 149 - protein, 243 aa, Artificial Sequence
  Synthetic Polypeptide
EVQLVESGGGLVQPGRSLRLSCAASGFTFSNFDMAWVRQAPAKGLEWVSSITTGADHAIYADSVKGRFTISRDNAKNTLYLQMNSLRAEDTAVYYCVRHGYYDGYHLFDYWGQGTLVTVSSGGGGSGGGGSGGGGSDIQMTQSPSSLSASVGDRVTITCRASQGISNYLNWYQQKPGKAPKPLIYYTSNLQSGVPSRFSGSGSGTDFTLTISSLQPEDFATYYCMGQTISSYTFGQGTKLEIK

SEQ ID NO: 150 - protein, 498 aa, Artificial Sequence
  Synthetic Polypeptide
EVQLVESGGGLVQPGRSLRLSCAASGFTFSNFDMAWVRQAPAKGLEWVSSITTGADHAIYADSVKGRFTISRDNAKNTLYLQMNSLRAEDTAVYYCVRHGYYDGYHLFDYWGQGTLVTVSSGGGGSGGGGSGGGGSDIQMTQSPSSLSASVGDRVTITCRASQGISNYLNWYQQKPGKAPKPLIYYTSNLQSGVPSRFSGSGSGTDFTLTISSLQPEDFATYYCMGQTISSYTFGQGTKLEIKSGGGGSEVQLVESGGGLVQPGGSLKLSCAASGFTFNKYAMNWVRQAPGKGLEWVARIRSKYNNYATYYADSVKDRFTISRDDSKNTAYLQMNNLKTEDTAVYYCVRHGNFGNSYISYWAYWGQGTLVTVSSGGGGSGGGGSGGGGSQTVVTQEPSLTVSPGGTVTLTCGSSTGAVTSGNYPNWVQQKPGQAPRGLIGGTKFLAPGTPARFSGSLLGGKAALTLSGVQPEDEAEYYCVLWYSNRWVFGGGTKLTVL

SEQ ID NO: 151 - protein, 5 aa, Artificial Sequence
  Synthetic Polypeptide
NHIIH

SEQ ID NO: 152 - protein, 17 aa, Artificial Sequence
  Synthetic Polypeptide
YINPYPGYHAYNEKFQG

SEQ ID NO: 153 - protein, 12 aa, Artificial Sequence
  Synthetic Polypeptide
DGYYRDTDVLDY

SEQ ID NO: 154 - protein, 11 aa, Artificial Sequence
  Synthetic Polypeptide
QASQDISNYLN

SEQ ID NO: 155 - protein, 7 aa, Artificial Sequence
  Synthetic Polypeptide
YTSRLHT

SEQ ID NO: 156 - protein, 9 aa, Artificial Sequence
  Synthetic Polypeptide
QQGNTLPWT

SEQ ID NO: 157 - protein, 121 aa, Artificial Sequence
  Synthetic Polypeptide
QVQLVQSGAEVKKPGASVKVSCKASGYTFTNHIIHWVRQAPGQGLEWMGYINPYPGYHAYNEKFQGRATMTSDTSTSTVYMELSSLRSEDTAVYYCARDGYYRDTDVLDYWGQGTLVTVSS

SEQ ID NO: 158 - protein, 107 aa, Artificial Sequence
  Synthetic Polypeptide
DIQMTQSPSSLSASLGDRVTITCQASQDISNYLNWYQQKPGKAPKLLIYYTSRLHTGVPSRFSGSGSGTDFTFTISSLQQEDIATYYCQQGNTLPWTFGQGTKVEIK

SEQ ID NO: 159 - protein, 243 aa, Artificial Sequence
  Synthetic Polypeptide
QVQLVQSGAEVKKPGASVKVSCKASGYTFTNHIIHWVRQAPGQGLEWMGYINPYPGYHAYNEKFQGRATMTSDTSTSTVYMELSSLRSEDTAVYYCARDGYYRDTDVLDYWGQGTLVTVSSGGGGSGGGGSGGGGSDIQMTQSPSSLSASLGDRVTITCQASQDISNYLNWYQQKPGKAPKLLIYYTSRLHTGVPSRFSGSGSGTDFTFTISSLQQEDIATYYCQQGNTLPWTFGQGTKVEIK

SEQ ID NO: 160 - protein, 498 aa, Artificial Sequence
  Synthetic Polypeptide
QVQLVQSGAEVKKPGASVKVSCKASGYTFTNHIIHWVRQAPGQGLEWMGYINPYPGYHAYNEKFQGRATMTSDTSTSTVYMELSSLRSEDTAVYYCARDGYYRDTDVLDYWGQGTLVTVSSGGGGSGGGGSGGGGSDIQMTQSPSSLSASLGDRVTITCQASQDISNYLNWYQQKPGKAPKLLIYYTSRLHTGVPSRFSGSGSGTDFTFTISSLQQEDIATYYCQQGNTLPWTFGQGTKVEIKSGGGGSEVQLVESGGGLVQPGGSLKLSCAASGFTFNKYAMNWVRQAPGKGLEWVARIRSKYNNYATYYADSVKDRFTISRDDSKNTAYLQMNNLKTEDTAVYYCVRHGNFGNSYISYWAYWGQGTLVTVSSGGGGSGGGGSGGGGSQTVVTQEPSLTVSPGGTVTLTCGSSTGAVTSGNYPNWVQQKPGQAPRGLIGGTKFLAPGTPARFSGSLLGGKAALTLSGVQPEDEAEYYCVLWYSNRWVFGGGTKLTVL

SEQ ID NO: 161 - protein, 5 aa, Artificial Sequence
  Synthetic Polypeptide
NHIIH

SEQ ID NO: 162 - protein, 17 aa, Artificial Sequence
  Synthetic Polypeptide
YINPYDGWGDYNEKFQG

SEQ ID NO: 163 - protein, 12 aa, Artificial Sequence
  Synthetic Polypeptide
DGYYRDADVLDY

SEQ ID NO: 164 - protein, 11 aa, Artificial Sequence
  Synthetic Polypeptide
QASQDISNYLN

SEQ ID NO: 165 - protein, 7 aa, Artificial Sequence
  Synthetic Polypeptide
YTSRLHT

SEQ ID NO: 166 - protein, 9 aa, Artificial Sequence
  Synthetic Polypeptide
QQGNTLPWT

SEQ ID NO: 167 - protein, 121 aa, Artificial Sequence
  Synthetic Polypeptide
QVQLVQSGAEVKKPGASVKVSCKASGYTFTNHIIHWVRQAPGQGLEWMGYINPYDGWGDYNEKFQGRATMTSDTSTSTVYMELSSLRSEDTAVYYCARDGYYRDADVLDYWGQGTLVTVSS

SEQ ID NO: 168 - protein, 107 aa, Artificial Sequence; identical to SEQ ID NO: 158
  Synthetic Polypeptide

SEQ ID NO: 169 - protein, 243 aa, Artificial Sequence
  Synthetic Polypeptide
QVQLVQSGAEVKKPGASVKVSCKASGYTFTNHIIHWVRQAPGQGLEWMGYINPYDGWGDYNEKFQGRATMTSDTSTSTVYMELSSLRSEDTAVYYCARDGYYRDADVLDYWGQGTLVTVSSGGGGSGGGGSGGGGSDIQMTQSPSSLSASLGDRVTITCQASQDISNYLNWYQQKPGKAPKLLIYYTSRLHTGVPSRFSGSGSGTDFTFTISSLQQEDIATYYCQQGNTLPWTFGQGTKVEIK

SEQ ID NO: 170 - protein, 498 aa, Artificial Sequence
  Synthetic Polypeptide
QVQLVQSGAEVKKPGASVKVSCKASGYTFTNHIIHWVRQAPGQGLEWMGYINPYDGWGDYNEKFQGRATMTSDTSTSTVYMELSSLRSEDTAVYYCARDGYYRDADVLDYWGQGTLVTVSSGGGGSGGGGSGGGGSDIQMTQSPSSLSASLGDRVTITCQASQDISNYLNWYQQKPGKAPKLLIYYTSRLHTGVPSRFSGSGSGTDFTFTISSLQQEDIATYYCQQGNTLPWTFGQGTKVEIKSGGGGSEVQLVESGGGLVQPGGSLKLSCAASGFTFNKYAMNWVRQAPGKGLEWVARIRSKYNNYATYYADSVKDRFTISRDDSKNTAYLQMNNLKTEDTAVYYCVRHGNFGNSYISYWAYWGQGTLVTVSSGGGGSGGGGSGGGGSQTVVTQEPSLTVSPGGTVTLTCGSSTGAVTSGNYPNWVQQKPGQAPRGLIGGTKFLAPGTPARFSGSLLGGKAALTLSGVQPEDEAEYYCVLWYSNRWVFGGGTKLTVL

SEQ ID NO: 171 - protein, 5 aa, Artificial Sequence
  Synthetic Polypeptide
NHIIH

SEQ ID NO: 172 - protein, 17 aa, Artificial Sequence
  Synthetic Polypeptide
YINPYPGYHAYNEKFQG

SEQ ID NO: 173 - protein, 12 aa, Artificial Sequence
  Synthetic Polypeptide
DGYYRDTDVLDY

SEQ ID NO: 174 - protein, 11 aa, Artificial Sequence
  Synthetic Polypeptide
QASQDISNYLN

SEQ ID NO: 175 - protein, 7 aa, Artificial Sequence
  Synthetic Polypeptide
YTSRLHT

SEQ ID NO: 176 - protein, 9 aa, Artificial Sequence
  Synthetic Polypeptide
QQGNTLPWT

SEQ ID NO: 177 - protein, 121 aa, Artificial Sequence
  Synthetic Polypeptide
QVQLVQSGAEVKKPGASVKVSCKASGYTFTNHIIHWVRQAPGQCLEWMGYINPYPGYHAYNEKFQGRATMTSDTSTSTVYMELSSLRSEDTAVYYCARDGYYRDTDVLDYWGQGTLVTVSS

SEQ ID NO: 178 - protein, 107 aa, Artificial Sequence
  Synthetic Polypeptide
DIQMTQSPSSLSASVGDRVTITCQASQDISNYLNWYQQKPGKAPKLLIYYTSRLHTGVPSRFSGSGSGTDFTFTISSLEPEDIATYYCQQGNTLPWTFGCGTKVEIK

SEQ ID NO: 179 - protein, 243 aa, Artificial Sequence
  Synthetic Polypeptide
QVQLVQSGAEVKKPGASVKVSCKASGYTFTNHIIHWVRQAPGQCLEWMGYINPYPGYHAYNEKFQGRATMTSDTSTSTVYMELSSLRSEDTAVYYCARDGYYRDTDVLDYWGQGTLVTVSSGGGGSGGGGSGGGGSDIQMTQSPSSLSASVGDRVTITCQASQDISNYLNWYQQKPGKAPKLLIYYTSRLHTGVPSRFSGSGSGTDFTFTISSLEPEDIATYYCQQGNTLPWTFGCGTKVEIK

SEQ ID NO: 180 - protein, 498 aa, Artificial Sequence
  Synthetic Polypeptide
QVQLVQSGAEVKKPGASVKVSCKASGYTFTNHIIHWVRQAPGQCLEWMGYINPYPGYHAYNEKFQGRATMTSDTSTSTVYMELSSLRSEDTAVYYCARDGYYRDTDVLDYWGQGTLVTVSSGGGGSGGGGSGGGGSDIQMTQSPSSLSASVGDRVTITCQASQDISNYLNWYQQKPGKAPKLLIYYTSRLHTGVPSRFSGSGSGTDFTFTISSLEPEDIATYYCQQGNTLPWTFGCGTKVEIKSGGGGSEVQLVESGGGLVQPGGSLKLSCAASGFTFNKYAMNWVRQAPGKGLEWVARIRSKYNNYATYYADSVKDRFTISRDDSKNTAYLQMNNLKTEDTAVYYCVRHGNFGNSYISYWAYWGQGTLVTVSSGGGGSGGGGSGGGGSQTVVTQEPSLTVSPGGTVTLTCGSSTGAVTSGNYPNWVQQKPGQAPRGLIGGTKFLAPGTPARFSGSLLGGKAALTLSGVQPEDEAEYYCVLWYSNRWVFGGGTKLTVL

SEQ ID NO: 181 - protein, 5 aa, Artificial Sequence
  Synthetic Polypeptide
NHIIH

SEQ ID NO: 182 - protein, 17 aa, Artificial Sequence
  Synthetic Polypeptide
YINPYDGWGDYNEKFQG

SEQ ID NO: 183 - protein, 12 aa, Artificial Sequence
  Synthetic Polypeptide
DGYYRDADVLDY

SEQ ID NO: 184 - protein, 11 aa, Artificial Sequence
  Synthetic Polypeptide
QASQDISNYLN

SEQ ID NO: 185 - protein, 7 aa, Artificial Sequence
  Synthetic Polypeptide
YTSRLHT

SEQ ID NO: 186 - protein, 9 aa, Artificial Sequence
  Synthetic Polypeptide
QQGNTLPWT

SEQ ID NO: 187 - protein, 121 aa, Artificial Sequence; identical to SEQ ID NO: 167
  Synthetic Polypeptide

SEQ ID NO: 188 - protein, 107 aa, Artificial Sequence
  Synthetic Polypeptide
DIQMTQSPSSLSASVGDRVTITCQASQDISNYLNWYQQKPGKAPKLLIYYTSRLHTGVPSRFSGSGSGTDFTFTISSLEPEDIATYYCQQGNTLPWTFGQGTKVEIK

SEQ ID NO: 189 - protein, 243 aa, Artificial Sequence
  Synthetic Polypeptide
QVQLVQSGAEVKKPGASVKVSCKASGYTFTNHIIHWVRQAPGQGLEWMGYINPYDGWGDYNEKFQGRATMTSDTSTSTVYMELSSLRSEDTAVYYCARDGYYRDADVLDYWGQGTLVTVSSGGGGSGGGGSGGGGSDIQMTQSPSSLSASVGDRVTITCQASQDISNYLNWYQQKPGKAPKLLIYYTSRLHTGVPSRFSGSGSGTDFTFTISSLEPEDIATYYCQQGNTLPWTFGQGTKVEIK

SEQ ID NO: 190 - protein, 498 aa, Artificial Sequence
  Synthetic Polypeptide
QVQLVQSGAEVKKPGASVKVSCKASGYTFTNHIIHWVRQAPGQGLEWMGYINPYDGWGDYNEKFQGRATMTSDTSTSTVYMELSSLRSEDTAVYYCARDGYYRDADVLDYWGQGTLVTVSSGGGGSGGGGSGGGGSDIQMTQSPSSLSASVGDRVTITCQASQDISNYLNWYQQKPGKAPKLLIYYTSRLHTGVPSRFSGSGSGTDFTFTISSLEPEDIATYYCQQGNTLPWTFGQGTKVEIKSGGGGSEVQLVESGGGLVQPGGSLKLSCAASGFTFNKYAMNWVRQAPGKGLEWVARIRSKYNNYATYYADSVKDRFTISRDDSKNTAYLQMNNLKTEDTAVYYCVRHGNFGNSYISYWAYWGQGTLVTVSSGGGGSGGGGSGGGGSQTVVTQEPSLTVSPGGTVTLTCGSSTGAVTSGNYPNWVQQKPGQAPRGLIGGTKFLAPGTPARFSGSLLGGKAALTLSGVQPEDEAEYYCVLWYSNRWVFGGGTKLTVL

SEQ ID NO: 191 - protein, 5 aa, Artificial Sequence
  Synthetic Polypeptide
NHIIH

SEQ ID NO: 192 - protein, 17 aa, Artificial Sequence
  Synthetic Polypeptide
YINPYPGYHAYNQKFQG

SEQ ID NO: 193 - protein, 12 aa, Artificial Sequence
  Synthetic Polypeptide
DGYYRDTDVLDY

SEQ ID NO: 194 - protein, 11 aa, Artificial Sequence
  Synthetic Polypeptide
QASQDISNYLN

SEQ ID NO: 195 - protein, 7 aa, Artificial Sequence
  Synthetic Polypeptide
YTSRLHT

SEQ ID NO: 196 - protein, 9 aa, Artificial Sequence
  Synthetic Polypeptide
QQGNTLPWT

SEQ ID NO: 197 - protein, 121 aa, Artificial Sequence
  Synthetic Polypeptide
QVQLVQSGAKVIKPGASVKVSCKASGYTFTNHIIHWVRQKPGQGLEWMGYINPYPGYHAYNQKFQGRVTMTRDKSTSTVYMELSSLTSEDTAVYYCARDGYYRDTDVLDYWGQGTLVTVSS

SEQ ID NO: 198 - protein, 107 aa, Artificial Sequence
  Synthetic Polypeptide
DIQMTQSPSSLSASVGDRVTITCQASQDISNYLNWYQQKPGRAPKLLIYYTSRLHTGVPSRFSGSGSGTDYSFTISSLQPEDIATYYCQQGNTLPWTFGQGTKVEIK

SEQ ID NO: 199 - protein, 243 aa, Artificial Sequence
  Synthetic Polypeptide
QVQLVQSGAKVIKPGASVKVSCKASGYTFTNHIIHWVRQKPGQGLEWMGYINPYPGYHAYNQKFQGRVTMTRDKSTSTVYMELSSLTSEDTAVYYCARDGYYRDTDVLDYWGQGTLVTVSSGGGGSGGGGSGGGGSDIQMTQSPSSLSASVGDRVTITCQASQDISNYLNWYQQKPGRAPKLLIYYTSRLHTGVPSRFSGSGSGTDYSFTISSLQPEDIATYYCQQGNTLPWTFGQGTKVEIK

SEQ ID NO: 200 - protein, 498 aa, Artificial Sequence
  Synthetic Polypeptide
QVQLVQSGAKVIKPGASVKVSCKASGYTFTNHIIHWVRQKPGQGLEWMGYINPYPGYHAYNQKFQGRVTMTRDKSTSTVYMELSSLTSEDTAVYYCARDGYYRDTDVLDYWGQGTLVTVSSGGGGSGGGGSGGGGSDIQMTQSPSSLSASVGDRVTITCQASQDISNYLNWYQQKPGRAPKLLIYYTSRLHTGVPSRFSGSGSGTDYSFTISSLQPEDIATYYCQQGNTLPWTFGQGTKVEIKSGGGGSEVQLVESGGGLVQPGGSLKLSCAASGFTFNKYAMNWVRQAPGKGLEWVARIRSKYNNYATYYADSVKDRFTISRDDSKNTAYLQMNNLKTEDTAVYYCVRHGNFGNSYISYWAYWGQGTLVTVSSGGGGSGGGGSGGGGSQTVVTQEPSLTVSPGGTVTLTCGSSTGAVTSGNYPNWVQQKPGQAPRGLIGGTKFLAPGTPARFSGSLLGGKAALTLSGVQPEDEAEYYCVLWYSNRWVFGGGTKLTVL

SEQ ID NO: 201 - protein, 5 aa, Artificial Sequence
  Synthetic Polypeptide
NHIIH

SEQ ID NO: 202 - protein, 17 aa, Artificial Sequence
  Synthetic Polypeptide
YINPYDGWGDYNQKFQG

SEQ ID NO: 203 - protein, 12 aa, Artificial Sequence
  Synthetic Polypeptide
DGYYRDADVLDY

SEQ ID NO: 204 - protein, 11 aa, Artificial Sequence
  Synthetic Polypeptide
QASQDISNYLN

SEQ ID NO: 205 - protein, 7 aa, Artificial Sequence
  Synthetic Polypeptide
YTSRLHT

SEQ ID NO: 206 - protein, 9 aa, Artificial Sequence
  Synthetic Polypeptide
QQGNTLPWT

SEQ ID NO: 207 - protein, 121 aa, Artificial Sequence
  Synthetic Polypeptide
QVQLVQSGAKVIKPGASVKVSCKASGYTFTNHIIHWVRQKPGQGLEWMGYINPYDGWGDYNQKFQGRVTMTRDKSTSTVYMELSSLTSEDTAVYYCARDGYYRDADVLDYWGQGTLVTVSS

SEQ ID NO: 208 - protein, 107 aa, Artificial Sequence; identical to SEQ ID NO: 198
  Synthetic Polypeptide

SEQ ID NO: 209 - protein, 243 aa, Artificial Sequence
  Synthetic Polypeptide
QVQLVQSGAKVIKPGASVKVSCKASGYTFTNHIIHWVRQKPGQGLEWMGYINPYDGWGDYNQKFQGRVTMTRDKSTSTVYMELSSLTSEDTAVYYCARDGYYRDADVLDYWGQGTLVTVSSGGGGSGGGGSGGGGSDIQMTQSPSSLSASVGDRVTITCQASQDISNYLNWYQQKPGRAPKLLIYYTSRLHTGVPSRFSGSGSGTDYSFTISSLQPEDIATYYCQQGNTLPWTFGQGTKVEIK

SEQ ID NO: 210 - protein, 498 aa, Artificial Sequence
  Synthetic Polypeptide
QVQLVQSGAKVIKPGASVKVSCKASGYTFTNHIIHWVRQKPGQGLEWMGYINPYDGWGDYNQKFQGRVTMTRDKSTSTVYMELSSLTSEDTAVYYCARDGYYRDADVLDYWGQGTLVTVSSGGGGSGGGGSGGGGSDIQMTQSPSSLSASVGDRVTITCQASQDISNYLNWYQQKPGRAPKLLIYYTSRLHTGVPSRFSGSGSGTDYSFTISSLQPEDIATYYCQQGNTLPWTFGQGTKVEIKSGGGGSEVQLVESGGGLVQPGGSLKLSCAASGFTFNKYAMNWVRQAPGKGLEWVARIRSKYNNYATYYADSVKDRFTISRDDSKNTAYLQMNNLKTEDTAVYYCVRHGNFGNSYISYWAYWGQGTLVTVSSGGGGSGGGGSGGGGSQTVVTQEPSLTVSPGGTVTLTCGSSTGAVTSGNYPNWVQQKPGQAPRGLIGGTKFLAPGTPARFSGSLLGGKAALTLSGVQPEDEAEYYCVLWYSNRWVFGGGTKLTVL

SEQ ID NO: 211 - protein, 5 aa, Artificial Sequence
  Synthetic Polypeptide
NHIIH

SEQ ID NO: 212 - protein, 17 aa, Artificial Sequence
  Synthetic Polypeptide
YINPYPGYHAYNQKFQG

SEQ ID NO: 213 - protein, 12 aa, Artificial Sequence
  Synthetic Polypeptide
DGYYRDTDVLDY

SEQ ID NO: 214 - protein, 11 aa, Artificial Sequence
  Synthetic Polypeptide
QASQDISNYLN

SEQ ID NO: 215 - protein, 7 aa, Artificial Sequence
  Synthetic Polypeptide
YTSRLHT

SEQ ID NO: 216 - protein, 9 aa, Artificial Sequence
  Synthetic Polypeptide
QQGNTLPWT

SEQ ID NO: 217 - protein, 121 aa, Artificial Sequence
  Synthetic Polypeptide
QVQLVQSGAEVIKPGASVKVSCKASGYTFTNHIIHWVRQKPGQGLEWIGYINPYPGYHAYNQKFQGKVTMTRDTSTSTVYMELSSLTSEDTAVYYCARDGYYRDTDVLDYWGQGTLVTVSS

SEQ ID NO: 218 - protein, 107 aa, Artificial Sequence; identical to SEQ ID NO: 158
  Synthetic Polypeptide

SEQ ID NO: 219 - protein, 243 aa, Artificial Sequence
  Synthetic Polypeptide
QVQLVQSGAEVIKPGASVKVSCKASGYTFTNHIIHWVRQKPGQGLEWIGYINPYPGYHAYNQKFQGKVTMTRDTSTSTVYMELSSLTSEDTAVYYCARDGYYRDTDVLDYWGQGTLVTVSSGGGGSGGGGSGGGGSDIQMTQSPSSLSASLGDRVTITCQASQDISNYLNWYQQKPGKAPKLLIYYTSRLHTGVPSRFSGSGSGTDFTFTISSLQQEDIATYYCQQGNTLPWTFGQGTKVEIK

SEQ ID NO: 220 - protein, 498 aa, Artificial Sequence
  Synthetic Polypeptide
QVQLVQSGAEVIKPGASVKVSCKASGYTFTNHIIHWVRQKPGQGLEWIGYINPYPGYHAYNQKFQGKVTMTRDTSTSTVYMELSSLTSEDTAVYYCARDGYYRDTDVLDYWGQGTLVTVSSGGGGSGGGGSGGGGSDIQMTQSPSSLSASLGDRVTITCQASQDISNYLNWYQQKPGKAPKLLIYYTSRLHTGVPSRFSGSGSGTDFTFTISSLQQEDIATYYCQQGNTLPWTFGQGTKVEIKSGGGGSEVQLVESGGGLVQPGGSLKLSCAASGFTFNKYAMNWVRQAPGKGLEWVARIRSKYNNYATYYADSVKDRFTISRDDSKNTAYLQMNNLKTEDTAVYYCVRHGNFGNSYISYWAYWGQGTLVTVSSGGGGSGGGGSGGGGSQTVVTQEPSLTVSPGGTVTLTCGSSTGAVTSGNYPNWVQQKPGQAPRGLIGGTKFLAPGTPARFSGSLLGGKAALTLSGVQPEDEAEYYCVLWYSNRWVFGGGTKLTVL

SEQ ID NO: 221 - protein, 5 aa, Artificial Sequence
  Synthetic Polypeptide
NHIIH

SEQ ID NO: 222 - protein, 17 aa, Artificial Sequence
  Synthetic Polypeptide
YINPYDGWGDYNQKFQG

SEQ ID NO: 223 - protein, 12 aa, Artificial Sequence
  Synthetic Polypeptide
DGYYRDADVLDY

SEQ ID NO: 224 - protein, 11 aa, Artificial Sequence
  Synthetic Polypeptide
QASQDISNYLN

SEQ ID NO: 225 - protein, 7 aa, Artificial Sequence
  Synthetic Polypeptide
YTSRLHT

SEQ ID NO: 226 - protein, 9 aa, Artificial Sequence
  Synthetic Polypeptide
QQGNTLPWT

SEQ ID NO: 227 - protein, 121 aa, Artificial Sequence
  Synthetic Polypeptide
QVQLVQSGAEVIKPGASVKVSCKASGYTFTNHIIHWVRQKPGQGLEWIGYINPYDGWGDYNQKFQGKVTMTRDTSTSTVYMELSSLTSEDTAVYYCARDGYYRDADVLDYWGQGTLVTVSS

SEQ ID NO: 228 - protein, 107 aa, Artificial Sequence; identical to SEQ ID NO: 158
  Synthetic Polypeptide

SEQ ID NO: 229 - protein, 243 aa, Artificial Sequence
  Synthetic Polypeptide
QVQLVQSGAEVIKPGASVKVSCKASGYTFTNHIIHWVRQKPGQGLEWIGYINPYDGWGDYNQKFQGKVTMTRDTSTSTVYMELSSLTSEDTAVYYCARDGYYRDADVLDYWGQGTLVTVSSGGGGSGGGGSGGGGSDIQMTQSPSSLSASLGDRVTITCQASQDISNYLNWYQQKPGKAPKLLIYYTSRLHTGVPSRFSGSGSGTDFTFTISSLQQEDIATYYCQQGNTLPWTFGQGTKVEIK

SEQ ID NO: 230 - protein, 498 aa, Artificial Sequence
  Synthetic Polypeptide
QVQLVQSGAEVIKPGASVKVSCKASGYTFTNHIIHWVRQKPGQGLEWIGYINPYDGWGDYNQKFQGKVTMTRDTSTSTVYMELSSLTSEDTAVYYCARDGYYRDADVLDYWGQGTLVTVSSGGGGSGGGGSGGGGSDIQMTQSPSSLSASLGDRVTITCQASQDISNYLNWYQQKPGKAPKLLIYYTSRLHTGVPSRFSGSGSGTDFTFTISSLQQEDIATYYCQQGNTLPWTFGQGTKVEIKSGGGGSEVQLVESGGGLVQPGGSLKLSCAASGFTFNKYAMNWVRQAPGKGLEWVARIRSKYNNYATYYADSVKDRFTISRDDSKNTAYLQMNNLKTEDTAVYYCVRHGNFGNSYISYWAYWGQGTLVTVSSGGGGSGGGGSGGGGSQTVVTQEPSLTVSPGGTVTLTCGSSTGAVTSGNYPNWVQQKPGQAPRGLIGGTKFLAPGTPARFSGSLLGGKAALTLSGVQPEDEAEYYCVLWYSNRWVFGGGTKLTVL

SEQ ID NO: 231 - protein, 5 aa, Artificial Sequence
  Synthetic Polypeptide
NYDMA

SEQ ID NO: 232 - protein, 17 aa, Artificial Sequence
  Synthetic Polypeptide
SIITSGGDNYYRDSVKG

SEQ ID NO: 233 - protein, 12 aa, Artificial Sequence
  Synthetic Polypeptide
HDYYDGSYGFAY

SEQ ID NO: 234 - protein, 11 aa, Artificial Sequence
  Synthetic Polypeptide
KASQSVGINVD

SEQ ID NO: 235 - protein, 7 aa, Artificial Sequence
  Synthetic Polypeptide
GASNRHT

SEQ ID NO: 236 - protein, 9 aa, Artificial Sequence
  Synthetic Polypeptide
LQYGSIPFT

SEQ ID NO: 237 - protein, 121 aa, Artificial Sequence
  Synthetic Polypeptide
QVQLVESGGGVVQPGRSLRLSCAASGFTFSNYDMAWVRQAPGKGLEWVASIITSGGDNYYRDSVKGRFTISRDNAKNTLYLQMNSLRAEDTAVYYCVRHDYYDGSYGFAYWGQGTLVTVSS

SEQ ID NO: 238 - protein, 107 aa, Artificial Sequence; identical to SEQ ID NO: 48
  Synthetic Polypeptide

SEQ ID NO: 239 - protein, 243 aa, Artificial Sequence
  Synthetic Polypeptide
QVQLVESGGGVVQPGRSLRLSCAASGFTFSNYDMAWVRQAPGKGLEWVASIITSGGDNYYRDSVKGRFTISRDNAKNTLYLQMNSLRAEDTAVYYCVRHDYYDGSYGFAYWGQGTLVTVSSGGGGSGGGGSGGGGSEIVMTQSPASMSVSPGERATLSCKASQSVGINVDWYQQKPGQAPRLLIYGASNRHTGIPARFSGSGSGTEFTLTISSLQSEDFAVYYCLQYGSIPFTFGPGTKVDIK

SEQ ID NO: 240 - protein, 498 aa, Artificial Sequence
  Synthetic Polypeptide
QVQLVESGGGVVQPGRSLRLSCAASGFTFSNYDMAWVRQAPGKGLEWVASIITSGGDNYYRDSVKGRFTISRDNAKNTLYLQMNSLRAEDTAVYYCVRHDYYDGSYGFAYWGQGTLVTVSSGGGGSGGGGSGGGGSEIVMTQSPASMSVSPGERATLSCKASQSVGINVDWYQQKPGQAPRLLIYGASNRHTGIPARFSGSGSGTEFTLTISSLQSEDFAVYYCLQYGSIPFTFGPGTKVDIKSGGGGSEVQLVESGGGLVQPGGSLKLSCAASGFTFNKYAMNWVRQAPGKGLEWVARIRSKYNNYATYYADSVKDRFTISRDDSKNTAYLQMNNLKTEDTAVYYCVRHGNFGNSYISYWAYWGQGTLVTVSSGGGGSGGGGSGGGGSQTVVTQEPSLTVSPGGTVTLTCGSSTGAVTSGNYPNWVQQKPGQAPRGLIGGTKFLAPGTPARFSGSLLGGKAALTLSGVQPEDEAEYYCVLWYSNRWVFGGGTKLTVL

SEQ ID NO: 241 - protein, 5 aa, Artificial Sequence
  Synthetic Polypeptide
NYDMA

SEQ ID NO: 242 - protein, 17 aa, Artificial Sequence
  Synthetic Polypeptide
SIITSGGDNYYRDSVKG

SEQ ID NO: 243 - protein, 12 aa, Artificial Sequence
  Synthetic Polypeptide
HDYYDGSYGFAY

SEQ ID NO: 244 - protein, 11 aa, Artificial Sequence
  Synthetic Polypeptide
KASQSVGINVD

SEQ ID NO: 245 - protein, 7 aa, Artificial Sequence
  Synthetic Polypeptide
GASNRHT

SEQ ID NO: 246 - protein, 9 aa, Artificial Sequence
  Synthetic Polypeptide
LQYGSIPFT

SEQ ID NO: 247 - protein, 121 aa, Artificial Sequence
  Synthetic Polypeptide
QVQLVESGGGVVQPGRSLRLSCAASGFTFSNYDMAWVRQAPGKGLEWVASIITSGGDNYYRDSVKGRFTISRDNSKNTLYLQMNSLRAEDTAVYYCVRHDYYDGSYGFAYWGQGTLVTVSS

SEQ ID NO: 248 - protein, 107 aa, Artificial Sequence; identical to SEQ ID NO: 8
  Synthetic Polypeptide

SEQ ID NO: 249 - protein, 243 aa, Artificial Sequence
  Synthetic Polypeptide
QVQLVESGGGVVQPGRSLRLSCAASGFTFSNYDMAWVRQAPGKGLEWVASIITSGGDNYYRDSVKGRFTISRDNSKNTLYLQMNSLRAEDTAVYYCVRHDYYDGSYGFAYWGQGTLVTVSSGGGGSGGGGSGGGGSEIVMTQSPATLSVSPGERVTLSCKASQSVGINVDWYQQKPGQAPRLLIYGASNRHTGIPARFSGSGSGREFTLTISSLQSEDFAVYYCLQYGSIPFTFGPGTKVDIK

SEQ ID NO: 250 - protein, 498 aa, Artificial Sequence
  Synthetic Polypeptide
QVQLVESGGGVVQPGRSLRLSCAASGFTFSNYDMAWVRQAPGKGLEWVASIITSGGDNYYRDSVKGRFTISRDNSKNTLYLQMNSLRAEDTAVYYCVRHDYYDGSYGFAYWGQGTLVTVSSGGGGSGGGGSGGGGSEIVMTQSPATLSVSPGERVTLSCKASQSVGINVDWYQQKPGQAPRLLIYGASNRHTGIPARFSGSGSGREFTLTISSLQSEDFAVYYCLQYGSIPFTFGPGTKVDIKSGGGGSEVQLVESGGGLVQPGGSLKLSCAASGFTFNKYAMNWVRQAPGKGLEWVARIRSKYNNYATYYADSVKDRFTISRDDSKNTAYLQMNNLKTEDTAVYYCVRHGNFGNSYISYWAYWGQGTLVTVSSGGGGSGGGGSGGGGSQTVVTQEPSLTVSPGGTVTLTCGSSTGAVTSGNYPNWVQQKPGQAPRGLIGGTKFLAPGTPARFSGSLLGGKAALTLSGVQPEDEAEYYCVLWYSNRWVFGGGTKLTVL

SEQ ID NO: 251 - protein, 5 aa, Artificial Sequence
  Synthetic Polypeptide
NYDMA

SEQ ID NO: 252 - protein, 17 aa, Artificial Sequence
  Synthetic Polypeptide
SIITSGGDNYYRDSVKG

SEQ ID NO: 253 - protein, 12 aa, Artificial Sequence
  Synthetic Polypeptide
HDYYDGSYGFAY

SEQ ID NO: 254 - protein, 11 aa, Artificial Sequence
  Synthetic Polypeptide
KASQSVGINVD

SEQ ID NO: 255 - protein, 7 aa, Artificial Sequence
  Synthetic Polypeptide
GASNRHT

SEQ ID NO: 256 - protein, 9 aa, Artificial Sequence
  Synthetic Polypeptide
LQYGSIPFT

SEQ ID NO: 257 - protein, 121 aa, Artificial Sequence
  Synthetic Polypeptide
QVQLVESGGGVVQPGRSLRLSCAASGFTFSNYDMAWVRQAPGKGLEWVASIITSGGDNYYRDSVKGRFTISRDNSKNTLYLQMNSLRSEDTAVYYCVRHDYYDGSYGFAYWGQGTLVTVSS

SEQ ID NO: 258 - protein, 107 aa, Artificial Sequence; identical to SEQ ID NO: 28
  Synthetic Polypeptide

SEQ ID NO: 259 - protein, 243 aa, Artificial Sequence
  Synthetic Polypeptide
QVQLVESGGGVVQPGRSLRLSCAASGFTFSNYDMAWVRQAPGKGLEWVASIITSGGDNYYRDSVKGRFTISRDNSKNTLYLQMNSLRSEDTAVYYCVRHDYYDGSYGFAYWGQGTLVTVSSGGGGSGGGGSGGGGSEIVMTQSPATLSVSPGERVTLSCKASQSVGINVDWYQQKPGQAPRLLIYGASNRHTGIPARFSGSGSGTEFTLTISSLQSEDFAVYYCLQYGSIPFTFGPGTKVDIK

SEQ ID NO: 260 - protein, 498 aa, Artificial Sequence
  Synthetic Polypeptide
QVQLVESGGGVVQPGRSLRLSCAASGFTFSNYDMAWVRQAPGKGLEWVASIITSGGDNYYRDSVKGRFTISRDNSKNTLYLQMNSLRSEDTAVYYCVRHDYYDGSYGFAYWGQGTLVTVSSGGGGSGGGGSGGGGSEIVMTQSPATLSVSPGERVTLSCKASQSVGINVDWYQQKPGQAPRLLIYGASNRHTGIPARFSGSGSGTEFTLTISSLQSEDFAVYYCLQYGSIPFTFGPGTKVDIKSGGGGSEVQLVESGGGLVQPGGSLKLSCAASGFTFNKYAMNWVRQAPGKGLEWVARIRSKYNNYATYYADSVKDRFTISRDDSKNTAYLQMNNLKTEDTAVYYCVRHGNFGNSYISYWAYWGQGTLVTVSSGGGGSGGGGSGGGGSQTVVTQEPSLTVSPGGTVTLTCGSSTGAVTSGNYPNWVQQKPGQAPRGLIGGTKFLAPGTPARFSGSLLGGKAALTLSGVQPEDEAEYYCVLWYSNRWVFGGGTKLTVL

SEQ ID NO: 261 - protein, 5 aa, Artificial Sequence
  Synthetic Polypeptide
NYDMA

SEQ ID NO: 262 - protein, 17 aa, Artificial Sequence
  Synthetic Polypeptide
SIITSGGDNYYRDSVKG

SEQ ID NO: 263 - protein, 12 aa, Artificial Sequence
  Synthetic Polypeptide
HDYYDGSYGFAY

SEQ ID NO: 264 - protein, 11 aa, Artificial Sequence
  Synthetic Polypeptide
KASQSVGINVD

SEQ ID NO: 265 - protein, 7 aa, Artificial Sequence
  Synthetic Polypeptide
GASNRHT

SEQ ID NO: 266 - protein, 9 aa, Artificial Sequence
  Synthetic Polypeptide
LQYGSIPFT

SEQ ID NO: 267 - protein, 121 aa, Artificial Sequence
  Synthetic Polypeptide
QVQLVESGGGVVQPGRSLRLSCAASGFTFSNYDMAWVRQAPGKGLEWVASIITSGGDNYYRDSVKGRFTVSRDNSKNTLYLQMNSLRAEDTAVYYCVRHDYYDGSYGFAYWGQGTLVTVSS

SEQ ID NO: 268 - protein, 107 aa, Artificial Sequence; identical to SEQ ID NO: 68
  Synthetic Polypeptide

SEQ ID NO: 269 - protein, 243 aa, Artificial Sequence
  Synthetic Polypeptide
QVQLVESGGGVVQPGRSLRLSCAASGFTFSNYDMAWVRQAPGKGLEWVASIITSGGDNYYRDSVKGRFTVSRDNSKNTLYLQMNSLRAEDTAVYYCVRHDYYDGSYGFAYWGQGTLVTVSSGGGGSGGGGSGGGGSEIVMTQSPATLSVSPGERATLSCKASQSVGINVDWYQQKPGQAPRLLIYGASNRHTGIPARFSGSGSGTEFTLTISSLQAEDFAVYYCLQYGSIPFTFGPGTKVDIK

SEQ ID NO: 270 - protein, 498 aa, Artificial Sequence
  Synthetic Polypeptide
QVQLVESGGGVVQPGRSLRLSCAASGFTFSNYDMAWVRQAPGKGLEWVASIITSGGDNYYRDSVKGRFTVSRDNSKNTLYLQMNSLRAEDTAVYYCVRHDYYDGSYGFAYWGQGTLVTVSSGGGGSGGGGSGGGGSEIVMTQSPATLSVSPGERATLSCKASQSVGINVDWYQQKPGQAPRLLIYGASNRHTGIPARFSGSGSGTEFTLTISSLQAEDFAVYYCLQYGSIPFTFGPGTKVDIKSGGGGSEVQLVESGGGLVQPGGSLKLSCAASGFTFNKYAMNWVRQAPGKGLEWVARIRSKYNNYATYYADSVKDRFTISRDDSKNTAYLQMNNLKTEDTAVYYCVRHGNFGNSYISYWAYWGQGTLVTVSSGGGGSGGGGSGGGGSQTVVTQEPSLTVSPGGTVTLTCGSSTGAVTSGNYPNWVQQKPGQAPRGLIGGTKFLAPGTPARFSGSLLGGKAALTLSGVQPEDEAEYYCVLWYSNRWVFGGGTKLTVL

SEQ ID NO: 271 - protein, 5 aa, Artificial Sequence
  Synthetic Polypeptide
NYDMA

SEQ ID NO: 272 - protein, 17 aa, Artificial Sequence
  Synthetic Polypeptide
SISTRGDITSYRDSVKG

SEQ ID NO: 273 - protein, 12 aa, Artificial Sequence
  Synthetic Polypeptide
QDYYTDYMGFAY

SEQ ID NO: 274 - protein, 11 aa, Artificial Sequence
  Synthetic Polypeptide
RASEDIYNGLA

SEQ ID NO: 275 - protein, 7 aa, Artificial Sequence
  Synthetic Polypeptide
GASSLQD

SEQ ID NO: 276 - protein, 9 aa, Artificial Sequence
  Synthetic Polypeptide
QQSYKYPLT

SEQ ID NO: 277 - protein, 121 aa, Artificial Sequence
  Synthetic Polypeptide
EVQLLESGGGLVQPGGSLRLSCAASGFTFSNYDMAWVRQAPGKGLEWVSSISTRGDITSYRDSVKGRFTISRDNAKNTLYLQMNSLRAEDTAVYYCARQDYYTDYMGFAYWGQGTLVTVSS

SEQ ID NO: 278 - protein, 107 aa, Artificial Sequence
  Synthetic Polypeptide
AIQMTQSPSSLSASVGDTVTITCRASEDIYNGLAWYQQKPGKAPKLLIYGASSLQDGVPSRFSGSGSGTDYTLTISSLQPEDEATYYCQQSYKYPLTFGGGTKVEIK

SEQ ID NO: 279 - protein, 243 aa, Artificial Sequence
  Synthetic Polypeptide
EVQLLESGGGLVQPGGSLRLSCAASGFTFSNYDMAWVRQAPGKGLEWVSSISTRGDITSYRDSVKGRFTISRDNAKNTLYLQMNSLRAEDTAVYYCARQDYYTDYMGFAYWGQGTLVTVSSGGGGSGGGGSGGGGSAIQMTQSPSSLSASVGDTVTITCRASEDIYNGLAWYQQKPGKAPKLLIYGASSLQDGVPSRFSGSGSGTDYTLTISSLQPEDEATYYCQQSYKYPLTFGGGTKVEIK

SEQ ID NO: 280 - protein, 498 aa, Artificial Sequence
  Synthetic Polypeptide
EVQLLESGGGLVQPGGSLRLSCAASGFTFSNYDMAWVRQAPGKGLEWVSSISTRGDITSYRDSVKGRFTISRDNAKNTLYLQMNSLRAEDTAVYYCARQDYYTDYMGFAYWGQGTLVTVSSGGGGSGGGGSGGGGSAIQMTQSPSSLSASVGDTVTITCRASEDIYNGLAWYQQKPGKAPKLLIYGASSLQDGVPSRFSGSGSGTDYTLTISSLQPEDEATYYCQQSYKYPLTFGGGTKVEIKSGGGGSEVQLVESGGGLVQPGGSLKLSCAASGFTFNKYAMNWVRQAPGKGLEWVARIRSKYNNYATYYADSVKDRFTISRDDSKNTAYLQMNNLKTEDTAVYYCVRHGNFGNSYISYWAYWGQGTLVTVSSGGGGSGGGGSGGGGSQTVVTQEPSLTVSPGGTVTLTCGSSTGAVTSGNYPNWVQQKPGQAPRGLIGGTKFLAPGTPARFSGSLLGGKAALTLSGVQPEDEAEYYCVLWYSNRWVFGGGTKLTVL

SEQ ID NO: 281 - protein, 5 aa, Artificial Sequence
  Synthetic Polypeptide
NYDMA

SEQ ID NO: 282 - protein, 17 aa, Artificial Sequence
  Synthetic Polypeptide
SISTRGDITSYRDSVKG

SEQ ID NO: 283 - protein, 12 aa, Artificial Sequence
  Synthetic Polypeptide
QDYYTDYMGFAY

SEQ ID NO: 284 - protein, 11 aa, Artificial Sequence
  Synthetic Polypeptide
RASEDIYNGLA

SEQ ID NO: 285 - protein, 7 aa, Artificial Sequence
  Synthetic Polypeptide
GASSLQD

SEQ ID NO: 286 - protein, 9 aa, Artificial Sequence
  Synthetic Polypeptide
QQSYKYPLT

SEQ ID NO: 287 - protein, 121 aa, Artificial Sequence
  Synthetic Polypeptide
EVQLLESGGGLVQPGRSLRLSCAASGFTFSNYDMAWVRQAPGKGLEWVSSISTRGDITSYRDSVKGRFTISRDNSKNTLYLQMNSLRAEDTAVYYCARQDYYTDYMGFAYWGQGTLVTVSS

SEQ ID NO: 288 - protein, 107 aa, Artificial Sequence
  Synthetic Polypeptide
AIQMTQSPSSLSASVGDRVTITCRASEDIYNGLAWYQQKPGKAPKLLIYGASSLQDGVPSRFSGSGSGTDFTLTISSMQPEDEATYYCQQSYKYPLTFGGGTKVEIK

SEQ ID NO: 289 - protein, 243 aa, Artificial Sequence
  Synthetic Polypeptide
EVQLLESGGGLVQPGRSLRLSCAASGFTFSNYDMAWVRQAPGKGLEWVSSISTRGDITSYRDSVKGRFTISRDNSKNTLYLQMNSLRAEDTAVYYCARQDYYTDYMGFAYWGQGTLVTVSSGGGGSGGGGSGGGGSAIQMTQSPSSLSASVGDRVTITCRASEDIYNGLAWYQQKPGKAPKLLIYGASSLQDGVPSRFSGSGSGTDFTLTISSMQPEDEATYYCQQSYKYPLTFGGGTKVEIK

SEQ ID NO: 290 - protein, 498 aa, Artificial Sequence
  Synthetic Polypeptide
EVQLLESGGGLVQPGRSLRLSCAASGFTFSNYDMAWVRQAPGKGLEWVSSISTRGDITSYRDSVKGRFTISRDNSKNTLYLQMNSLRAEDTAVYYCARQDYYTDYMGFAYWGQGTLVTVSSGGGGSGGGGSGGGGSAIQMTQSPSSLSASVGDRVTITCRASEDIYNGLAWYQQKPGKAPKLLIYGASSLQDGVPSRFSGSGSGTDFTLTISSMQPEDEATYYCQQSYKYPLTFGGGTKVEIKSGGGGSEVQLVESGGGLVQPGGSLKLSCAASGFTFNKYAMNWVRQAPGKGLEWVARIRSKYNNYATYYADSVKDRFTISRDDSKNTAYLQMNNLKTEDTAVYYCVRHGNFGNSYISYWAYWGQGTLVTVSSGGGGSGGGGSGGGGSQTVVTQEPSLTVSPGGTVTLTCGSSTGAVTSGNYPNWVQQKPGQAPRGLIGGTKFLAPGTPARFSGSLLGGKAALTLSGVQPEDEAEYYCVLWYSNRWVFGGGTKLTVL

SEQ ID NO: 291 - protein, 5 aa, Artificial Sequence
  Synthetic Polypeptide
NYDMA

SEQ ID NO: 292 - protein, 17 aa, Artificial Sequence
  Synthetic Polypeptide
SISTRGDITSYRDSVKG

SEQ ID NO: 293 - protein, 12 aa, Artificial Sequence
  Synthetic Polypeptide
QDYYTDYMGFAY

SEQ ID NO: 294 - protein, 11 aa, Artificial Sequence
  Synthetic Polypeptide
RASEDIYNGLA

SEQ ID NO: 295 - protein, 7 aa, Artificial Sequence
  Synthetic Polypeptide
GASSLQD

SEQ ID NO: 296 - protein, 9 aa, Artificial Sequence
  Synthetic Polypeptide
QQSYKYPLT

SEQ ID NO: 297 - protein, 121 aa, Artificial Sequence
  Synthetic Polypeptide
EVQLLESGGGLVQPGGSLRLSCAASGFTFSNYDMAWVRQAPGKGLEWVSSISTRGDITSYRDSVKGRFTISRDNSKNTLYLQMNSLRAEDTAVYYCARQDYYTDYMGFAYWGQGTLVTVSS

SEQ ID NO: 298 - protein, 107 aa, Artificial Sequence
  Synthetic Polypeptide
AIQMTQSPSSLSASVGDRVTITCRASEDIYNGLAWYQQKPGKAPKLLIYGASSLQDGVPSRFSGSGSGTHYTLTISSLQPEDEATYYCQQSYKYPLTFGGGTKVEIK

SEQ ID NO: 299 - protein, 243 aa, Artificial Sequence
  Synthetic Polypeptide
EVQLLESGGGLVQPGGSLRLSCAASGFTFSNYDMAWVRQAPGKGLEWVSSISTRGDITSYRDSVKGRFTISRDNSKNTLYLQMNSLRAEDTAVYYCARQDYYTDYMGFAYWGQGTLVTVSSGGGGSGGGGSGGGGSAIQMTQSPSSLSASVGDRVTITCRASEDIYNGLAWYQQKPGKAPKLLIYGASSLQDGVPSRFSGSGSGTHYTLTISSLQPEDEATYYCQQSYKYPLTFGGGTKVEIK

SEQ ID NO: 300 - protein, 498 aa, Artificial Sequence
  Synthetic Polypeptide
EVQLLESGGGLVQPGGSLRLSCAASGFTFSNYDMAWVRQAPGKGLEWVSSISTRGDITSYRDSVKGRFTISRDNSKNTLYLQMNSLRAEDTAVYYCARQDYYTDYMGFAYWGQGTLVTVSSGGGGSGGGGSGGGGSAIQMTQSPSSLSASVGDRVTITCRASEDIYNGLAWYQQKPGKAPKLLIYGASSLQDGVPSRFSGSGSGTHYTLTISSLQPEDEATYYCQQSYKYPLTFGGGTKVEIKSGGGGSEVQLVESGGGLVQPGGSLKLSCAASGFTFNKYAMNWVRQAPGKGLEWVARIRSKYNNYATYYADSVKDRFTISRDDSKNTAYLQMNNLKTEDTAVYYCVRHGNFGNSYISYWAYWGQGTLVTVSSGGGGSGGGGSGGGGSQTVVTQEPSLTVSPGGTVTLTCGSSTGAVTSGNYPNWVQQKPGQAPRGLIGGTKFLAPGTPARFSGSLLGGKAALTLSGVQPEDEAEYYCVLWYSNRWVFGGGTKLTVL

SEQ ID NO: 301 - protein, 5 aa, Artificial Sequence
  Synthetic Polypeptide
NYDMA

SEQ ID NO: 302 - protein, 17 aa, Artificial Sequence
  Synthetic Polypeptide
SISTRGDITSYRDSVKG

SEQ ID NO: 303 - protein, 12 aa, Artificial Sequence
  Synthetic Polypeptide
QDYYTDYMGFAY

SEQ ID NO: 304 - protein, 11 aa, Artificial Sequence
  Synthetic Polypeptide
RASEDIYNGLA

SEQ ID NO: 305 - protein, 7 aa, Artificial Sequence
  Synthetic Polypeptide
GASSLQD

SEQ ID NO: 306 - protein, 9 aa, Artificial Sequence
  Synthetic Polypeptide
AGPHKYPLT

SEQ ID NO: 307 - protein, 121 aa, Artificial Sequence; identical to SEQ ID NO: 277
  Synthetic Polypeptide

SEQ ID NO: 308 - protein, 107 aa, Artificial Sequence
  Synthetic Polypeptide
AIQMTQSPSSLSASVGDTVTITCRASEDIYNGLAWYQQKPGKAPKLLIYGASSLQDGVPSRFSGSGSGTDYTLTISSLQPEDEATYYCAGPHKYPLTFGGGTKVEIK

SEQ ID NO: 309 - protein, 243 aa, Artificial Sequence
  Synthetic Polypeptide
EVQLLESGGGLVQPGGSLRLSCAASGFTFSNYDMAWVRQAPGKGLEWVSSISTRGDITSYRDSVKGRFTISRDNAKNTLYLQMNSLRAEDTAVYYCARQDYYTDYMGFAYWGQGTLVTVSSGGGGSGGGGSGGGGSAIQMTQSPSSLSASVGDTVTITCRASEDIYNGLAWYQQKPGKAPKLLIYGASSLQDGVPSRFSGSGSGTDYTLTISSLQPEDEATYYCAGPHKYPLTFGGGTKVEIK

SEQ ID NO: 310 - protein, 498 aa, Artificial Sequence
  Synthetic Polypeptide
EVQLLESGGGLVQPGGSLRLSCAASGFTFSNYDMAWVRQAPGKGLEWVSSISTRGDITSYRDSVKGRFTISRDNAKNTLYLQMNSLRAEDTAVYYCARQDYYTDYMGFAYWGQGTLVTVSSGGGGSGGGGSGGGGSAIQMTQSPSSLSASVGDTVTITCRASEDIYNGLAWYQQKPGKAPKLLIYGASSLQDGVPSRFSGSGSGTDYTLTISSLQPEDEATYYCAGPHKYPLTFGGGTKVEIKSGGGGSEVQLVESGGGLVQPGGSLKLSCAASGFTFNKYAMNWVRQAPGKGLEWVARIRSKYNNYATYYADSVKDRFTISRDDSKNTAYLQMNNLKTEDTAVYYCVRHGNFGNSYISYWAYWGQGTLVTVSSGGGGSGGGGSGGGGSQTVVTQEPSLTVSPGGTVTLTCGSSTGAVTSGNYPNWVQQKPGQAPRGLIGGTKFLAPGTPARFSGSLLGGKAALTLSGVQPEDEAEYYCVLWYSNRWVFGGGTKLTVL

SEQ ID NO: 311 - protein, 5 aa, Artificial Sequence
  Synthetic Polypeptide
NYDMA

SEQ ID NO: 312 - protein, 17 aa, Artificial Sequence
  Synthetic Polypeptide
SISTRGDITSYRDSVKG

SEQ ID NO: 313 - protein, 12 aa, Artificial Sequence
  Synthetic Polypeptide
QDYYTDYMGFAY

SEQ ID NO: 314 - protein, 11 aa, Artificial Sequence
  Synthetic Polypeptide
RASEDIYNGLA

SEQ ID NO: 315 - protein, 7 aa, Artificial Sequence
  Synthetic Polypeptide
GASSLQD

SEQ ID NO: 316 - protein, 9 aa, Artificial Sequence
  Synthetic Polypeptide
AGPHKYPLT

SEQ ID NO: 317 - protein, 121 aa, Artificial Sequence; identical to SEQ ID NO: 297
  Synthetic Polypeptide

SEQ ID NO: 318 - protein, 107 aa, Artificial Sequence
  Synthetic Polypeptide
AIQMTQSPSSLSASVGDRVTITCRASEDIYNGLAWYQQKPGKAPKLLIYGASSLQDGVPSRFSGSGSGTHYTLTISSLQPEDEATYYCAGPHKYPLTFGGGTKVEIK

SEQ ID NO: 319 - protein, 243 aa, Artificial Sequence
  Synthetic Polypeptide
EVQLLESGGGLVQPGGSLRLSCAASGFTFSNYDMAWVRQAPGKGLEWVSSISTRGDITSYRDSVKGRFTISRDNSKNTLYLQMNSLRAEDTAVYYCARQDYYTDYMGFAYWGQGTLVTVSSGGGGSGGGGSGGGGSAIQMTQSPSSLSASVGDRVTITCRASEDIYNGLAWYQQKPGKAPKLLIYGASSLQDGVPSRFSGSGSGTHYTLTISSLQPEDEATYYCAGPHKYPLTFGGGTKVEIK

SEQ ID NO: 320 - protein, 498 aa, Artificial Sequence
  Synthetic Polypeptide
EVQLLESGGGLVQPGGSLRLSCAASGFTFSNYDMAWVRQAPGKGLEWVSSISTRGDITSYRDSVKGRFTISRDNSKNTLYLQMNSLRAEDTAVYYCARQDYYTDYMGFAYWGQGTLVTVSSGGGGSGGGGSGGGGSAIQMTQSPSSLSASVGDRVTITCRASEDIYNGLAWYQQKPGKAPKLLIYGASSLQDGVPSRFSGSGSGTHYTLTISSLQPEDEATYYCAGPHKYPLTFGGGTKVEIKSGGGGSEVQLVESGGGLVQPGGSLKLSCAASGFTFNKYAMNWVRQAPGKGLEWVARIRSKYNNYATYYADSVKDRFTISRDDSKNTAYLQMNNLKTEDTAVYYCVRHGNFGNSYISYWAYWGQGTLVTVSSGGGGSGGGGSGGGGSQTVVTQEPSLTVSPGGTVTLTCGSSTGAVTSGNYPNWVQQKPGQAPRGLIGGTKFLAPGTPARFSGSLLGGKAALTLSGVQPEDEAEYYCVLWYSNRWVFGGGTKLTVL

SEQ ID NO: 321 - protein, 5 aa, Artificial Sequence
  Synthetic Polypeptide
NYDMA

SEQ ID NO: 322 - protein, 17 aa, Artificial Sequence
  Synthetic Polypeptide
SISTRGDITSYRDSVKG

SEQ ID NO: 323 - protein, 12 aa, Artificial Sequence
  Synthetic Polypeptide
QDYYTDYMGFAY

SEQ ID NO: 324 - protein, 11 aa, Artificial Sequence
  Synthetic Polypeptide
RASEDIYNGLA

SEQ ID NO: 325 - protein, 7 aa, Artificial Sequence
  Synthetic Polypeptide
GASSLQD

SEQ ID NO: 326 - protein, 9 aa, Artificial Sequence
  Synthetic Polypeptide
QQSRNYQQT

SEQ ID NO: 327 - protein, 121 aa, Artificial Sequence; identical to SEQ ID NO: 277
  Synthetic Polypeptide

SEQ ID NO: 328 - protein, 107 aa, Artificial Sequence
  Synthetic Polypeptide
AIQMTQSPSSLSASVGDTVTITCRASEDIYNGLAWYQQKPGKAPKLLIYGASSLQDGVPSRFSGSGSGTDYTLTISSLQPEDEATYYCQQSRNYQQTFGGGTKVEIK

SEQ ID NO: 329 - protein, 243 aa, Artificial Sequence
  Synthetic Polypeptide
EVQLLESGGGLVQPGGSLRLSCAASGFTFSNYDMAWVRQAPGKGLEWVSSISTRGDITSYRDSVKGRFTISRDNAKNTLYLQMNSLRAEDTAVYYCARQDYYTDYMGFAYWGQGTLVTVSSGGGGSGGGGSGGGGSAIQMTQSPSSLSASVGDTVTITCRASEDIYNGLAWYQQKPGKAPKLLIYGASSLQDGVPSRFSGSGSGTDYTLTISSLQPEDEATYYCQQSRNYQQTFGGGTKVEIK

SEQ ID NO: 330 - protein, 498 aa, Artificial Sequence
  Synthetic Polypeptide
EVQLLESGGGLVQPGGSLRLSCAASGFTFSNYDMAWVRQAPGKGLEWVSSISTRGDITSYRDSVKGRFTISRDNAKNTLYLQMNSLRAEDTAVYYCARQDYYTDYMGFAYWGQGTLVTVSSGGGGSGGGGSGGGGSAIQMTQSPSSLSASVGDTVTITCRASEDIYNGLAWYQQKPGKAPKLLIYGASSLQDGVPSRFSGSGSGTDYTLTISSLQPEDEATYYCQQSRNYQQTFGGGTKVEIKSGGGGSEVQLVESGGGLVQPGGSLKLSCAASGFTFNKYAMNWVRQAPGKGLEWVARIRSKYNNYATYYADSVKDRFTISRDDSKNTAYLQMNNLKTEDTAVYYCVRHGNFGNSYISYWAYWGQGTLVTVSSGGGGSGGGGSGGGGSQTVVTQEPSLTVSPGGTVTLTCGSSTGAVTSGNYPNWVQQKPGQAPRGLIGGTKFLAPGTPARFSGSLLGGKAALTLSGVQPEDEAEYYCVLWYSNRWVFGGGTKLTVL

SEQ ID NO: 331 - protein, 5 aa, Artificial Sequence
  Synthetic Polypeptide
NYDMA

SEQ ID NO: 332 - protein, 17 aa, Artificial Sequence
  Synthetic Polypeptide
SISTRGDITSYRDSVKG

SEQ ID NO: 333 - protein, 12 aa, Artificial Sequence
  Synthetic Polypeptide
QDYYTDYMGFAY

SEQ ID NO: 334 - protein, 11 aa, Artificial Sequence
  Synthetic Polypeptide
RASEDIYNGLA

SEQ ID NO: 335 - protein, 7 aa, Artificial Sequence
  Synthetic Polypeptide
GASSLQD

SEQ ID NO: 336 - protein, 9 aa, Artificial Sequence
  Synthetic Polypeptide
QQSRNYQQT

SEQ ID NO: 337 - protein, 121 aa, Artificial Sequence; identical to SEQ ID NO: 297
  Synthetic Polypeptide

SEQ ID NO: 338 - protein, 107 aa, Artificial Sequence
  Synthetic Polypeptide
AIQMTQSPSSLSASVGDRVTITCRASEDIYNGLAWYQQKPGKAPKLLIYGASSLQDGVPSRFSGSGSGTHYTLTISSLQPEDEATYYCQQSRNYQQTFGGGTKVEIK

SEQ ID NO: 339 - protein, 243 aa, Artificial Sequence
  Synthetic Polypeptide
EVQLLESGGGLVQPGGSLRLSCAASGFTFSNYDMAWVRQAPGKGLEWVSSISTRGDITSYRDSVKGRFTISRDNSKNTLYLQMNSLRAEDTAVYYCARQDYYTDYMGFAYWGQGTLVTVSSGGGGSGGGGSGGGGSAIQMTQSPSSLSASVGDRVTITCRASEDIYNGLAWYQQKPGKAPKLLIYGASSLQDGVPSRFSGSGSGTHYTLTISSLQPEDEATYYCQQSRNYQQTFGGGTKVEIK

SEQ ID NO: 340 - protein, 498 aa, Artificial Sequence
  Synthetic Polypeptide
EVQLLESGGGLVQPGGSLRLSCAASGFTFSNYDMAWVRQAPGKGLEWVSSISTRGDITSYRDSVKGRFTISRDNSKNTLYLQMNSLRAEDTAVYYCARQDYYTDYMGFAYWGQGTLVTVSSGGGGSGGGGSGGGGSAIQMTQSPSSLSASVGDRVTITCRASEDIYNGLAWYQQKPGKAPKLLIYGASSLQDGVPSRFSGSGSGTHYTLTISSLQPEDEATYYCQQSRNYQQTFGGGTKVEIKSGGGGSEVQLVESGGGLVQPGGSLKLSCAASGFTFNKYAMNWVRQAPGKGLEWVARIRSKYNNYATYYADSVKDRFTISRDDSKNTAYLQMNNLKTEDTAVYYCVRHGNFGNSYISYWAYWGQGTLVTVSSGGGGSGGGGSGGGGSQTVVTQEPSLTVSPGGTVTLTCGSSTGAVTSGNYPNWVQQKPGQAPRGLIGGTKFLAPGTPARFSGSLLGGKAALTLSGVQPEDEAEYYCVLWYSNRWVFGGGTKLTVL

SEQ ID NO: 341 - protein, 5 aa, Artificial Sequence
  Synthetic Polypeptide
NYDMA

SEQ ID NO: 342 - protein, 17 aa, Artificial Sequence
  Synthetic Polypeptide
SISTRGDITSYRDSVKG

SEQ ID NO: 343 - protein, 12 aa, Artificial Sequence
  Synthetic Polypeptide
QDYYTDYMGFAY

SEQ ID NO: 344 - protein, 11 aa, Artificial Sequence
  Synthetic Polypeptide
RASEDIYNGLA

SEQ ID NO: 345 - protein, 7 aa, Artificial Sequence
  Synthetic Polypeptide
GASSLQD

SEQ ID NO: 346 - protein, 9 aa, Artificial Sequence
  Synthetic Polypeptide
QQSRNYQQT

SEQ ID NO: 347 - protein, 121 aa, Artificial Sequence; identical to SEQ ID NO: 297
  Synthetic Polypeptide

SEQ ID NO: 348 - protein, 107 aa, Artificial Sequence
  Synthetic Polypeptide
AIQMTQSPSSLSASVGDRVTITCRASEDIYNGLAWYQQKPGKAPKLLIYGASSLQDGVPSRFSGSGSGTEFTLTISSLQPEDEATYYCQQSRNYQQTFGGGTKVEIK

SEQ ID NO: 349 - protein, 243 aa, Artificial Sequence
  Synthetic Polypeptide
EVQLLESGGGLVQPGGSLRLSCAASGFTFSNYDMAWVRQAPGKGLEWVSSISTRGDITSYRDSVKGRFTISRDNSKNTLYLQMNSLRAEDTAVYYCARQDYYTDYMGFAYWGQGTLVTVSSGGGGSGGGGSGGGGSAIQMTQSPSSLSASVGDRVTITCRASEDIYNGLAWYQQKPGKAPKLLIYGASSLQDGVPSRFSGSGSGTEFTLTISSLQPEDEATYYCQQSRNYQQTFGGGTKVEIK

SEQ ID NO: 350 - protein, 498 aa, Artificial Sequence
  Synthetic Polypeptide
EVQLLESGGGLVQPGGSLRLSCAASGFTFSNYDMAWVRQAPGKGLEWVSSISTRGDITSYRDSVKGRFTISRDNSKNTLYLQMNSLRAEDTAVYYCARQDYYTDYMGFAYWGQGTLVTVSSGGGGSGGGGSGGGGSAIQMTQSPSSLSASVGDRVTITCRASEDIYNGLAWYQQKPGKAPKLLIYGASSLQDGVPSRFSGSGSGTEFTLTISSLQPEDEATYYCQQSRNYQQTFGGGTKVEIKSGGGGSEVQLVESGGGLVQPGGSLKLSCAASGFTFNKYAMNWVRQAPGKGLEWVARIRSKYNNYATYYADSVKDRFTISRDDSKNTAYLQMNNLKTEDTAVYYCVRHGNFGNSYISYWAYWGQGTLVTVSSGGGGSGGGGSGGGGSQTVVTQEPSLTVSPGGTVTLTCGSSTGAVTSGNYPNWVQQKPGQAPRGLIGGTKFLAPGTPARFSGSLLGGKAALTLSGVQPEDEAEYYCVLWYSNRWVFGGGTKLTVL

SEQ ID NO: 351 - protein, 5 aa, Artificial Sequence
  Synthetic Polypeptide
NYDMA

SEQ ID NO: 352 - protein, 17 aa, Artificial Sequence
  Synthetic Polypeptide
SISTRGDITSYRDSVKG

SEQ ID NO: 353 - protein, 12 aa, Artificial Sequence
  Synthetic Polypeptide
QDYYTDYMGFAY

SEQ ID NO: 354 - protein, 11 aa, Artificial Sequence
  Synthetic Polypeptide
RASEDIYNGLA

SEQ ID NO: 355 - protein, 7 aa, Artificial Sequence
  Synthetic Polypeptide
GASSLQD

SEQ ID NO: 356 - protein, 9 aa, Artificial Sequence
  Synthetic Polypeptide
AGPHKYPLT

SEQ ID NO: 357 - protein, 121 aa, Artificial Sequence; identical to SEQ ID NO: 297
  Synthetic Polypeptide

SEQ ID NO: 358 - protein, 107 aa, Artificial Sequence
  Synthetic Polypeptide
AIQMTQSPSSLSASVGDRVTITCRASEDIYNGLAWYQQKPGKAPKLLIYGASSLQDGVPSRFSGSGSGTEFTLTISSLQPEDEATYYCAGPHKYPLTFGGGTKVEIK

SEQ ID NO: 359 - protein, 243 aa, Artificial Sequence
  Synthetic Polypeptide
EVQLLESGGGLVQPGGSLRLSCAASGFTFSNYDMAWVRQAPGKGLEWVSSISTRGDITSYRDSVKGRFTISRDNSKNTLYLQMNSLRAEDTAVYYCARQDYYTDYMGFAYWGQGTLVTVSSGGGGSGGGGSGGGGSAIQMTQSPSSLSASVGDRVTITCRASEDIYNGLAWYQQKPGKAPKLLIYGASSLQDGVPSRFSGSGSGTEFTLTISSLQPEDEATYYCAGPHKYPLTFGGGTKVEIK

SEQ ID NO: 360 - protein, 498 aa, Artificial Sequence
  Synthetic Polypeptide
EVQLLESGGGLVQPGGSLRLSCAASGFTFSNYDMAWVRQAPGKGLEWVSSISTRGDITSYRDSVKGRFTISRDNSKNTLYLQMNSLRAEDTAVYYCARQDYYTDYMGFAYWGQGTLVTVSSGGGGSGGGGSGGGGSAIQMTQSPSSLSASVGDRVTITCRASEDIYNGLAWYQQKPGKAPKLLIYGASSLQDGVPSRFSGSGSGTEFTLTISSLQPEDEATYYCAGPHKYPLTFGGGTKVEIKSGGGGSEVQLVESGGGLVQPGGSLKLSCAASGFTFNKYAMNWVRQAPGKGLEWVARIRSKYNNYATYYADSVKDRFTISRDDSKNTAYLQMNNLKTEDTAVYYCVRHGNFGNSYISYWAYWGQGTLVTVSSGGGGSGGGGSGGGGSQTVVTQEPSLTVSPGGTVTLTCGSSTGAVTSGNYPNWVQQKPGQAPRGLIGGTKFLAPGTPARFSGSLLGGKAALTLSGVQPEDEAEYYCVLWYSNRWVFGGGTKLTVL

SEQ ID NO: 361 - protein, 5 aa, Artificial Sequence
  Synthetic Polypeptide
NYDMA

SEQ ID NO: 362 - protein, 17 aa, Artificial Sequence
  Synthetic Polypeptide
SISTRGDITSYRDSVKG

SEQ ID NO: 363 - protein, 12 aa, Artificial Sequence
  Synthetic Polypeptide
QDYYTDYMGFAY

SEQ ID NO: 364 - protein, 11 aa, Artificial Sequence
  Synthetic Polypeptide
RASEDIYNGLA

SEQ ID NO: 365 - protein, 7 aa, Artificial Sequence
  Synthetic Polypeptide
GASSLQD

SEQ ID NO: 366 - protein, 9 aa, Artificial Sequence
  Synthetic Polypeptide
AGPHKYPLT

SEQ ID NO: 367 - protein, 121 aa, Artificial Sequence; identical to SEQ ID NO: 287
  Synthetic Polypeptide

SEQ ID NO: 368 - protein, 107 aa, Artificial Sequence
  Synthetic Polypeptide
AIQMTQSPSSLSASVGDRVTITCRASEDIYNGLAWYQQKPGKAPKLLIYGASSLQDGVPSRFSGSGSGTDFTLTISSMQPEDEATYYCAGPHKYPLTFGGGTKVEIK

SEQ ID NO: 369 - protein, 243 aa, Artificial Sequence
  Synthetic Polypeptide
EVQLLESGGGLVQPGRSLRLSCAASGFTFSNYDMAWVRQAPGKGLEWVSSISTRGDITSYRDSVKGRFTISRDNSKNTLYLQMNSLRAEDTAVYYCARQDYYTDYMGFAYWGQGTLVTVSSGGGGSGGGGSGGGGSAIQMTQSPSSLSASVGDRVTITCRASEDIYNGLAWYQQKPGKAPKLLIYGASSLQDGVPSRFSGSGSGTDFTLTISSMQPEDEATYYCAGPHKYPLTFGGGTKVEIK

SEQ ID NO: 370 - protein, 498 aa, Artificial Sequence
  Synthetic Polypeptide
EVQLLESGGGLVQPGRSLRLSCAASGFTFSNYDMAWVRQAPGKGLEWVSSISTRGDITSYRDSVKGRFTISRDNSKNTLYLQMNSLRAEDTAVYYCARQDYYTDYMGFAYWGQGTLVTVSSGGGGSGGGGSGGGGSAIQMTQSPSSLSASVGDRVTITCRASEDIYNGLAWYQQKPGKAPKLLIYGASSLQDGVPSRFSGSGSGTDFTLTISSMQPEDEATYYCAGPHKYPLTFGGGTKVEIKSGGGGSEVQLVESGGGLVQPGGSLKLSCAASGFTFNKYAMNWVRQAPGKGLEWVARIRSKYNNYATYYADSVKDRFTISRDDSKNTAYLQMNNLKTEDTAVYYCVRHGNFGNSYISYWAYWGQGTLVTVSSGGGGSGGGGSGGGGSQTVVTQEPSLTVSPGGTVTLTCGSSTGAVTSGNYPNWVQQKPGQAPRGLIGGTKFLAPGTPARFSGSLLGGKAALTLSGVQPEDEAEYYCVLWYSNRWVFGGGTKLTVL

SEQ ID NO: 371 - protein, 5 aa, Artificial Sequence
  Synthetic Polypeptide
NYDMA

SEQ ID NO: 372 - protein, 17 aa, Artificial Sequence
  Synthetic Polypeptide
SISTRGDITSYRDSVKG

SEQ ID NO: 373 - protein, 12 aa, Artificial Sequence
  Synthetic Polypeptide
QDYYTDYMGFAY

SEQ ID NO: 374 - protein, 11 aa, Artificial Sequence
  Synthetic Polypeptide
RASEDIYNGLA

SEQ ID NO: 375 - protein, 7 aa, Artificial Sequence
  Synthetic Polypeptide
GASSLQD

SEQ ID NO: 376 - protein, 9 aa, Artificial Sequence
  Synthetic Polypeptide
QQSRNYQQT

SEQ ID NO: 377 - protein, 121 aa, Artificial Sequence; identical to SEQ ID NO: 287
  Synthetic Polypeptide

SEQ ID NO: 378 - protein, 107 aa, Artificial Sequence
  Synthetic Polypeptide
AIQMTQSPSSLSASVGDRVTITCRASEDIYNGLAWYQQKPGKAPKLLIYGASSLQDGVPSRFSGSGSGTDFTLTISSMQPEDEATYYCQQSRNYQQTFGGGTKVEIK

SEQ ID NO: 379 - protein, 243 aa, Artificial Sequence
  Synthetic Polypeptide
EVQLLESGGGLVQPGRSLRLSCAASGFTFSNYDMAWVRQAPGKGLEWVSSISTRGDITSYRDSVKGRFTISRDNSKNTLYLQMNSLRAEDTAVYYCARQDYYTDYMGFAYWGQGTLVTVSSGGGGSGGGGSGGGGSAIQMTQSPSSLSASVGDRVTITCRASEDIYNGLAWYQQKPGKAPKLLIYGASSLQDGVPSRFSGSGSGTDFTLTISSMQPEDEATYYCQQSRNYQQTFGGGTKVEIK

SEQ ID NO: 380 - protein, 498 aa, Artificial Sequence
  Synthetic Polypeptide
EVQLLESGGGLVQPGRSLRLSCAASGFTFSNYDMAWVRQAPGKGLEWVSSISTRGDITSYRDSVKGRFTISRDNSKNTLYLQMNSLRAEDTAVYYCARQDYYTDYMGFAYWGQGTLVTVSSGGGGSGGGGSGGGGSAIQMTQSPSSLSASVGDRVTITCRASEDIYNGLAWYQQKPGKAPKLLIYGASSLQDGVPSRFSGSGSGTDFTLTISSMQPEDEATYYCQQSRNYQQTFGGGTKVEIKSGGGGSEVQLVESGGGLVQPGGSLKLSCAASGFTFNKYAMNWVRQAPGKGLEWVARIRSKYNNYATYYADSVKDRFTISRDDSKNTAYLQMNNLKTEDTAVYYCVRHGNFGNSYISYWAYWGQGTLVTVSSGGGGSGGGGSGGGGSQTVVTQEPSLTVSPGGTVTLTCGSSTGAVTSGNYPNWVQQKPGQAPRGLIGGTKFLAPGTPARFSGSLLGGKAALTLSGVQPEDEAEYYCVLWYSNRWVFGGGTKLTVL

SEQ ID NO: 381 - protein, 5 aa, Artificial Sequence
  Synthetic Polypeptide
NFDMA

SEQ ID NO: 382 - protein, 17 aa, Artificial Sequence
  Synthetic Polypeptide
SITTGGGDTYYADSVKG

SEQ ID NO: 383 - protein, 12 aa, Artificial Sequence
  Synthetic Polypeptide
HGYYDGYHLFDY

SEQ ID NO: 384 - protein, 11 aa, Artificial Sequence
  Synthetic Polypeptide
RASQGISNYLN

SEQ ID NO: 385 - protein, 7 aa, Artificial Sequence
  Synthetic Polypeptide
YTSNLQS

SEQ ID NO: 386 - protein, 9 aa, Artificial Sequence
  Synthetic Polypeptide
MGQTISSYT

SEQ ID NO: 387 - protein, 121 aa, Artificial Sequence
  Synthetic Polypeptide
EVQLVESGGGLVQPGGSLRLSCAASGFTFSNFDMAWVRQAPGKGLVWVSSITTGGGDTYYADSVKGRFTISRDNAKNTLYLQMDSLRAEDTAVYYCVRHGYYDGYHLFDYWGQGTLVTVSS

SEQ ID NO: 388 - protein, 107 aa, Artificial Sequence; identical to SEQ ID NO: 98
  Synthetic Polypeptide

SEQ ID NO: 389 - protein, 243 aa, Artificial Sequence
  Synthetic Polypeptide
EVQLVESGGGLVQPGGSLRLSCAASGFTFSNFDMAWVRQAPGKGLVWVSSITTGGGDTYYADSVKGRFTISRDNAKNTLYLQMDSLRAEDTAVYYCVRHGYYDGYHLFDYWGQGTLVTVSSGGGGSGGGGSGGGGSDIQMTQSPSSLSASVGDRVTITCRASQGISNYLNWYQQKPGKAPKPLIYYTSNLQSGVPSRFSGSGSGTDYTLTISSLQPEDFATYYCMGQTISSYTFGQGTKLEIK

SEQ ID NO: 390 - protein, 498 aa, Artificial Sequence
  Synthetic Polypeptide
EVQLVESGGGLVQPGGSLRLSCAASGFTFSNFDMAWVRQAPGKGLVWVSSITTGGGDTYYADSVKGRFTISRDNAKNTLYLQMDSLRAEDTAVYYCVRHGYYDGYHLFDYWGQGTLVTVSSGGGGSGGGGSGGGGSDIQMTQSPSSLSASVGDRVTITCRASQGISNYLNWYQQKPGKAPKPLIYYTSNLQSGVPSRFSGSGSGTDYTLTISSLQPEDFATYYCMGQTISSYTFGQGTKLEIKSGGGGSEVQLVESGGGLVQPGGSLKLSCAASGFTFNKYAMNWVRQAPGKGLEWVARIRSKYNNYATYYADSVKDRFTISRDDSKNTAYLQMNNLKTEDTAVYYCVRHGNFGNSYISYWAYWGQGTLVTVSSGGGGSGGGGSGGGGSQTVVTQEPSLTVSPGGTVTLTCGSSTGAVTSGNYPNWVQQKPGQAPRGLIGGTKFLAPGTPARFSGSLLGGKAALTLSGVQPEDEAEYYCVLWYSNRWVFGGGTKLTVL

SEQ ID NO: 391 - protein, 5 aa, Artificial Sequence
  Synthetic Polypeptide
NFDMA

SEQ ID NO: 392 - protein, 17 aa, Artificial Sequence
  Synthetic Polypeptide
SITTGGGDTYYADSVKG

SEQ ID NO: 393 - protein, 12 aa, Artificial Sequence
  Synthetic Polypeptide
HGYYDGYHLFDY

SEQ ID NO: 394 - protein, 11 aa, Artificial Sequence
  Synthetic Polypeptide
RASQGISNYLN

SEQ ID NO: 395 - protein, 7 aa, Artificial Sequence
  Synthetic Polypeptide
YTSNLQS

SEQ ID NO: 396 - protein, 9 aa, Artificial Sequence
  Synthetic Polypeptide
MGQTISSYT

SEQ ID NO: 397 - protein, 121 aa, Artificial Sequence
  Synthetic Polypeptide
EVQLVESGGGLVQPGGSLRLSCAASGFTFSNFDMAWVRQAPGKGLVWVSSITTGGGDTYYADSVKGRFTISRDNAKNTLYLQMNSLRAEDTAVYYCVRHGYYDGYHLFDYWGQGTLVTVSS

SEQ ID NO: 398 - protein, 107 aa, Artificial Sequence; identical to SEQ ID NO: 98
  Synthetic Polypeptide

SEQ ID NO: 399 - protein, 243 aa, Artificial Sequence
  Synthetic Polypeptide
EVQLVESGGGLVQPGGSLRLSCAASGFTFSNFDMAWVRQAPGKGLVWVSSITTGGGDTYYADSVKGRFTISRDNAKNTLYLQMNSLRAEDTAVYYCVRHGYYDGYHLFDYWGQGTLVTVSSGGGGSGGGGSGGGGSDIQMTQSPSSLSASVGDRVTITCRASQGISNYLNWYQQKPGKAPKPLIYYTSNLQSGVPSRFSGSGSGTDYTLTISSLQPEDFATYYCMGQTISSYTFGQGTKLEIK

SEQ ID NO: 400 - protein, 498 aa, Artificial Sequence
  Synthetic Polypeptide
EVQLVESGGGLVQPGGSLRLSCAASGFTFSNFDMAWVRQAPGKGLVWVSSITTGGGDTYYADSVKGRFTISRDNAKNTLYLQMNSLRAEDTAVYYCVRHGYYDGYHLFDYWGQGTLVTVSSGGGGSGGGGSGGGGSDIQMTQSPSSLSASVGDRVTITCRASQGISNYLNWYQQKPGKAPKPLIYYTSNLQSGVPSRFSGSGSGTDYTLTISSLQPEDFATYYCMGQTISSYTFGQGTKLEIKSGGGGSEVQLVESGGGLVQPGGSLKLSCAASGFTFNKYAMNWVRQAPGKGLEWVARIRSKYNNYATYYADSVKDRFTISRDDSKNTAYLQMNNLKTEDTAVYYCVRHGNFGNSYISYWAYWGQGTLVTVSSGGGGSGGGGSGGGGSQTVVTQEPSLTVSPGGTVTLTCGSSTGAVTSGNYPNWVQQKPGQAPRGLIGGTKFLAPGTPARFSGSLLGGKAALTLSGVQPEDEAEYYCVLWYSNRWVFGGGTKLTVL

SEQ ID NO: 401 - protein, 5 aa, Artificial Sequence
  Synthetic Polypeptide
NFDMA

SEQ ID NO: 402 - protein, 17 aa, Artificial Sequence
  Synthetic Polypeptide
SITTGGGDTYYADSVKG

SEQ ID NO: 403 - protein, 12 aa, Artificial Sequence
  Synthetic Polypeptide
HGYYDGYHLFDY

SEQ ID NO: 404 - protein, 11 aa, Artificial Sequence
  Synthetic Polypeptide
RASQGISNYLN

SEQ ID NO: 405 - protein, 7 aa, Artificial Sequence
  Synthetic Polypeptide
YTSNLQS

SEQ ID NO: 406 - protein, 9 aa, Artificial Sequence
  Synthetic Polypeptide
MGQTISSYT

SEQ ID NO: 407 - protein, 121 aa, Artificial Sequence
  Synthetic Polypeptide
EVQLVESGGGLVQPGGSLRLSCAASGFTFSNFDMAWVRQAPGKGLVWVSSITTGGGDTYYADSVKGRFTISRDNAKNTLYLQMDSLRSEDTAVYYCVRHGYYDGYHLFDYWGQGTLVTVSS

SEQ ID NO: 408 - protein, 107 aa, Artificial Sequence; identical to SEQ ID NO: 138
  Synthetic Polypeptide

SEQ ID NO: 409 - protein, 243 aa, Artificial Sequence
  Synthetic Polypeptide
EVQLVESGGGLVQPGGSLRLSCAASGFTFSNFDMAWVRQAPGKGLVWVSSITTGGGDTYYADSVKGRFTISRDNAKNTLYLQMDSLRSEDTAVYYCVRHGYYDGYHLFDYWGQGTLVTVSSGGGGSGGGGSGGGGSDIQMTQSPSSLSASVGDRVTISCRASQGISNYLNWYQQKPGKAPKPLIYYTSNLQSGVPSRFSGSGSGTDYTLTISSLQPEDFATYYCMGQTISSYTFGQGTKLEIK

SEQ ID NO: 410 - protein, 498 aa, Artificial Sequence
  Synthetic Polypeptide
EVQLVESGGGLVQPGGSLRLSCAASGFTFSNFDMAWVRQAPGKGLVWVSSITTGGGDTYYADSVKGRFTISRDNAKNTLYLQMDSLRSEDTAVYYCVRHGYYDGYHLFDYWGQGTLVTVSSGGGGSGGGGSGGGGSDIQMTQSPSSLSASVGDRVTISCRASQGISNYLNWYQQKPGKAPKPLIYYTSNLQSGVPSRFSGSGSGTDYTLTISSLQPEDFATYYCMGQTISSYTFGQGTKLEIKSGGGGSEVQLVESGGGLVQPGGSLKLSCAASGFTFNKYAMNWVRQAPGKGLEWVARIRSKYNNYATYYADSVKDRFTISRDDSKNTAYLQMNNLKTEDTAVYYCVRHGNFGNSYISYWAYWGQGTLVTVSSGGGGSGGGGSGGGGSQTVVTQEPSLTVSPGGTVTLTCGSSTGAVTSGNYPNWVQQKPGQAPRGLIGGTKFLAPGTPARFSGSLLGGKAALTLSGVQPEDEAEYYCVLWYSNRWVFGGGTKLTVL

SEQ ID NO: 411 - protein, 5 aa, Artificial Sequence
  Synthetic Polypeptide
NFDMA

SEQ ID NO: 412 - protein, 17 aa, Artificial Sequence
  Synthetic Polypeptide
SITTGGGDTYYADSVKG

SEQ ID NO: 413 - protein, 12 aa, Artificial Sequence
  Synthetic Polypeptide
HGYYDGYHLFDY

SEQ ID NO: 414 - protein, 11 aa, Artificial Sequence
  Synthetic Polypeptide
RASQGISNYLN

SEQ ID NO: 415 - protein, 7 aa, Artificial Sequence
  Synthetic Polypeptide
YTSNLQS

SEQ ID NO: 416 - protein, 9 aa, Artificial Sequence
  Synthetic Polypeptide
MGQTISSYT

SEQ ID NO: 417 - protein, 121 aa, Artificial Sequence
  Synthetic Polypeptide
EVQLVESGGGLVQPGRSLRLSCAASGFTFSNFDMAWVRQAPAKGLEWVSSITTGGGDTYYADSVKGRFTISRDNAKNTLYLQMNSLRAEDTAVYYCVRHGYYDGYHLFDYWGQGTLVTVSS

SEQ ID NO: 418 - protein, 107 aa, Artificial Sequence; identical to SEQ ID NO: 148
  Synthetic Polypeptide

SEQ ID NO: 419 - protein, 243 aa, Artificial Sequence
  Synthetic Polypeptide
EVQLVESGGGLVQPGRSLRLSCAASGFTFSNFDMAWVRQAPAKGLEWVSSITTGGGDTYYADSVKGRFTISRDNAKNTLYLQMNSLRAEDTAVYYCVRHGYYDGYHLFDYWGQGTLVTVSSGGGGSGGGGSGGGGSDIQMTQSPSSLSASVGDRVTITCRASQGISNYLNWYQQKPGKAPKPLIYYTSNLQSGVPSRFSGSGSGTDFTLTISSLQPEDFATYYCMGQTISSYTFGQGTKLEIK

SEQ ID NO: 420 - protein, 498 aa, Artificial Sequence
  Synthetic Polypeptide
EVQLVESGGGLVQPGRSLRLSCAASGFTFSNFDMAWVRQAPAKGLEWVSSITTGGGDTYYADSVKGRFTISRDNAKNTLYLQMNSLRAEDTAVYYCVRHGYYDGYHLFDYWGQGTLVTVSSGGGGSGGGGSGGGGSDIQMTQSPSSLSASVGDRVTITCRASQGISNYLNWYQQKPGKAPKPLIYYTSNLQSGVPSRFSGSGSGTDFTLTISSLQPEDFATYYCMGQTISSYTFGQGTKLEIKSGGGGSEVQLVESGGGLVQPGGSLKLSCAASGFTFNKYAMNWVRQAPGKGLEWVARIRSKYNNYATYYADSVKDRFTISRDDSKNTAYLQMNNLKTEDTAVYYCVRHGNFGNSYISYWAYWGQGTLVTVSSGGGGSGGGGSGGGGSQTVVTQEPSLTVSPGGTVTLTCGSSTGAVTSGNYPNWVQQKPGQAPRGLIGGTKFLAPGTPARFSGSLLGGKAALTLSGVQPEDEAEYYCVLWYSNRWVFGGGTKLTVL

SEQ ID NO: 421 - protein, 5 aa, Artificial Sequence
  Synthetic Polypeptide
NFDMA

SEQ ID NO: 422 - protein, 17 aa, Artificial Sequence
  Synthetic Polypeptide
SITTGGGDTYYADSVKG

SEQ ID NO: 423 - protein, 12 aa, Artificial Sequence
  Synthetic Polypeptide
HGYYDGYHLFDY

SEQ ID NO: 424 - protein, 11 aa, Artificial Sequence
  Synthetic Polypeptide
RASQGISNHLN

SEQ ID NO: 425 - protein, 7 aa, Artificial Sequence
  Synthetic Polypeptide
YTSNLQS

SEQ ID NO: 426 - protein, 9 aa, Artificial Sequence
  Synthetic Polypeptide
QQYFDRPYT

SEQ ID NO: 427 - protein, 121 aa, Artificial Sequence; identical to SEQ ID NO: 397
  Synthetic Polypeptide

SEQ ID NO: 428 - protein, 107 aa, Artificial Sequence
  Synthetic Polypeptide
DIQMTQSPSSLSASVGDRVTISCRASQGISNHLNWFQQKPGRAPKPLIYYTSNLQSGVPSRFSGSGSGTDFTLTISSLQPEDFATYYCQQYFDRPYTFGGGTKVEIK

SEQ ID NO: 429 - protein, 243 aa, Artificial Sequence
  Synthetic Polypeptide
EVQLVESGGGLVQPGGSLRLSCAASGFTFSNFDMAWVRQAPGKGLVWVSSITTGGGDTYYADSVKGRFTISRDNAKNTLYLQMNSLRAEDTAVYYCVRHGYYDGYHLFDYWGQGTLVTVSSGGGGSGGGGSGGGGSDIQMTQSPSSLSASVGDRVTISCRASQGISNHLNWFQQKPGRAPKPLIYYTSNLQSGVPSRFSGSGSGTDFTLTISSLQPEDFATYYCQQYFDRPYTFGGGTKVEIK

SEQ ID NO: 430 - protein, 498 aa, Artificial Sequence
  Synthetic Polypeptide
EVQLVESGGGLVQPGGSLRLSCAASGFTFSNFDMAWVRQAPGKGLVWVSSITTGGGDTYYADSVKGRFTISRDNAKNTLYLQMNSLRAEDTAVYYCVRHGYYDGYHLFDYWGQGTLVTVSSGGGGSGGGGSGGGGSDIQMTQSPSSLSASVGDRVTISCRASQGISNHLNWFQQKPGRAPKPLIYYTSNLQSGVPSRFSGSGSGTDFTLTISSLQPEDFATYYCQQYFDRPYTFGGGTKVEIKSGGGGSEVQLVESGGGLVQPGGSLKLSCAASGFTFNKYAMNWVRQAPGKGLEWVARIRSKYNNYATYYADSVKDRFTISRDDSKNTAYLQMNNLKTEDTAVYYCVRHGNFGNSYISYWAYWGQGTLVTVSSGGGGSGGGGSGGGGSQTVVTQEPSLTVSPGGTVTLTCGSSTGAVTSGNYPNWVQQKPGQAPRGLIGGTKFLAPGTPARFSGSLLGGKAALTLSGVQPEDEAEYYCVLWYSNRWVFGGGTKLTVL

SEQ ID NO: 431 - protein, 5 aa, Artificial Sequence
  Synthetic Polypeptide
NFDMA

SEQ ID NO: 432 - protein, 17 aa, Artificial Sequence
  Synthetic Polypeptide
SITTGGGDTYYADSVKG

SEQ ID NO: 433 - protein, 12 aa, Artificial Sequence
  Synthetic Polypeptide
HGYYDGYHLFDY

SEQ ID NO: 434 - protein, 11 aa, Artificial Sequence
  Synthetic Polypeptide
RASQGISNHLN

SEQ ID NO: 435 - protein, 7 aa, Artificial Sequence
  Synthetic Polypeptide
YTSNLQS

SEQ ID NO: 436 - protein, 9 aa, Artificial Sequence
  Synthetic Polypeptide
QQYFDRPYT

SEQ ID NO: 437 - protein, 121 aa, Artificial Sequence; identical to SEQ ID NO: 387
  Synthetic Polypeptide

SEQ ID NO: 438 - protein, 107 aa, Artificial Sequence
  Synthetic Polypeptide
DIQMTQSPSSLSASVGDRVTISCRASQGISNHLNWYQQKPGKAPKPLIYYTSNLQSGVPSRFSGSGSGTDYTLTISSLQPEDFATYYCQQYFDRPYTFGGGTKVEIK

SEQ ID NO: 439 - protein, 243 aa, Artificial Sequence
  Synthetic Polypeptide
EVQLVESGGGLVQPGGSLRLSCAASGFTFSNFDMAWVRQAPGKGLVWVSSITTGGGDTYYADSVKGRFTISRDNAKNTLYLQMDSLRAEDTAVYYCVRHGYYDGYHLFDYWGQGTLVTVSSGGGGSGGGGSGGGGSDIQMTQSPSSLSASVGDRVTISCRASQGISNHLNWYQQKPGKAPKPLIYYTSNLQSGVPSRFSGSGSGTDYTLTISSLQPEDFATYYCQQYFDRPYTFGGGTKVEIK

SEQ ID NO: 440 - protein, 498 aa, Artificial Sequence
  Synthetic Polypeptide
EVQLVESGGGLVQPGGSLRLSCAASGFTFSNFDMAWVRQAPGKGLVWVSSITTGGGDTYYADSVKGRFTISRDNAKNTLYLQMDSLRAEDTAVYYCVRHGYYDGYHLFDYWGQGTLVTVSSGGGGSGGGGSGGGGSDIQMTQSPSSLSASVGDRVTISCRASQGISNHLNWYQQKPGKAPKPLIYYTSNLQSGVPSRFSGSGSGTDYTLTISSLQPEDFATYYCQQYFDRPYTFGGGTKVEIKSGGGGSEVQLVESGGGLVQPGGSLKLSCAASGFTFNKYAMNWVRQAPGKGLEWVARIRSKYNNYATYYADSVKDRFTISRDDSKNTAYLQMNNLKTEDTAVYYCVRHGNFGNSYISYWAYWGQGTLVTVSSGGGGSGGGGSGGGGSQTVVTQEPSLTVSPGGTVTLTCGSSTGAVTSGNYPNWVQQKPGQAPRGLIGGTKFLAPGTPARFSGSLLGGKAALTLSGVQPEDEAEYYCVLWYSNRWVFGGGTKLTVL

SEQ ID NO: 441 - protein, 5 aa, Artificial Sequence
  Synthetic Polypeptide
NFDMA

SEQ ID NO: 442 - protein, 17 aa, Artificial Sequence
  Synthetic Polypeptide
SITTGGGDTYYADSVKG

SEQ ID NO: 443 - protein, 12 aa, Artificial Sequence
  Synthetic Polypeptide
HGYYDGYHLFDY

SEQ ID NO: 444 - protein, 11 aa, Artificial Sequence
  Synthetic Polypeptide
RASQGISNHLN

SEQ ID NO: 445 - protein, 7 aa, Artificial Sequence
  Synthetic Polypeptide
YTSNLQS

SEQ ID NO: 446 - protein, 9 aa, Artificial Sequence
  Synthetic Polypeptide
QQYFDRPYT

SEQ ID NO: 447 - protein, 121 aa, Artificial Sequence; identical to SEQ ID NO: 387
  Synthetic Polypeptide

SEQ ID NO: 448 - protein, 107 aa, Artificial Sequence
  Synthetic Polypeptide
DIQMTQSPSSLSASVGDRVTITCRASQGISNHLNWFQQKPGKAPKPLIYYTSNLQSGVPSRFSGSGSGTDFTLTISSLQPEDFATYYCQQYFDRPYTFGGGTKVEIK

SEQ ID NO: 449 - protein, 243 aa, Artificial Sequence
  Synthetic Polypeptide
EVQLVESGGGLVQPGGSLRLSCAASGFTFSNFDMAWVRQAPGKGLVWVSSITTGGGDTYYADSVKGRFTISRDNAKNTLYLQMDSLRAEDTAVYYCVRHGYYDGYHLFDYWGQGTLVTVSSGGGGSGGGGSGGGGSDIQMTQSPSSLSASVGDRVTITCRASQGISNHLNWFQQKPGKAPKPLIYYTSNLQSGVPSRFSGSGSGTDFTLTISSLQPEDFATYYCQQYFDRPYTFGGGTKVEIK

SEQ ID NO: 450 - protein, 498 aa, Artificial Sequence
  Synthetic Polypeptide
EVQLVESGGGLVQPGGSLRLSCAASGFTFSNFDMAWVRQAPGKGLVWVSSITTGGGDTYYADSVKGRFTISRDNAKNTLYLQMDSLRAEDTAVYYCVRHGYYDGYHLFDYWGQGTLVTVSSGGGGSGGGGSGGGGSDIQMTQSPSSLSASVGDRVTITCRASQGISNHLNWFQQKPGKAPKPLIYYTSNLQSGVPSRFSGSGSGTDFTLTISSLQPEDFATYYCQQYFDRPYTFGGGTKVEIKSGGGGSEVQLVESGGGLVQPGGSLKLSCAASGFTFNKYAMNWVRQAPGKGLEWVARIRSKYNNYATYYADSVKDRFTISRDDSKNTAYLQMNNLKTEDTAVYYCVRHGNFGNSYISYWAYWGQGTLVTVSSGGGGSGGGGSGGGGSQTVVTQEPSLTVSPGGTVTLTCGSSTGAVTSGNYPNWVQQKPGQAPRGLIGGTKFLAPGTPARFSGSLLGGKAALTLSGVQPEDEAEYYCVLWYSNRWVFGGGTKLTVL

SEQ ID NO: 451 - protein, 5 aa, Artificial Sequence
  Synthetic Polypeptide
NFDMA

SEQ ID NO: 452 - protein, 17 aa, Artificial Sequence
  Synthetic Polypeptide
SITTGGGDTYYADSVKG

SEQ ID NO: 453 - protein, 12 aa, Artificial Sequence
  Synthetic Polypeptide
HGYYDGYHLFDY

SEQ ID NO: 454 - protein, 11 aa, Artificial Sequence
  Synthetic Polypeptide
RASQGISNHLN

SEQ ID NO: 455 - protein, 7 aa, Artificial Sequence
  Synthetic Polypeptide
YTSNLQS

SEQ ID NO: 456 - protein, 9 aa, Artificial Sequence
  Synthetic Polypeptide
QQYFDRPYT

SEQ ID NO: 457 - protein, 121 aa, Artificial Sequence; identical to SEQ ID NO: 417
  Synthetic Polypeptide

SEQ ID NO: 458 - protein, 107 aa, Artificial Sequence
  Synthetic Polypeptide
DIQMTQSPSSLSASVGERVTITCRASQGISNHLNWYQQKPGKAPKSLIYYTSNLQSGVPSRFSGSGSGTDFTLTISSLQPEDFATYYCQQYFDRPYTFGGGTKVEIK

SEQ ID NO: 459 - protein, 243 aa, Artificial Sequence
  Synthetic Polypeptide
EVQLVESGGGLVQPGRSLRLSCAASGFTFSNFDMAWVRQAPAKGLEWVSSITTGGGDTYYADSVKGRFTISRDNAKNTLYLQMNSLRAEDTAVYYCVRHGYYDGYHLFDYWGQGTLVTVSSGGGGSGGGGSGGGGSDIQMTQSPSSLSASVGERVTITCRASQGISNHLNWYQQKPGKAPKSLIYYTSNLQSGVPSRFSGSGSGTDFTLTISSLQPEDFATYYCQQYFDRPYTFGGGTKVEIK

SEQ ID NO: 460 - protein, 498 aa, Artificial Sequence
  Synthetic Polypeptide
EVQLVESGGGLVQPGRSLRLSCAASGFTFSNFDMAWVRQAPAKGLEWVSSITTGGGDTYYADSVKGRFTISRDNAKNTLYLQMNSLRAEDTAVYYCVRHGYYDGYHLFDYWGQGTLVTVSSGGGGSGGGGSGGGGSDIQMTQSPSSLSASVGERVTITCRASQGISNHLNWYQQKPGKAPKSLIYYTSNLQSGVPSRFSGSGSGTDFTLTISSLQPEDFATYYCQQYFDRPYTFGGGTKVEIKSGGGGSEVQLVESGGGLVQPGGSLKLSCAASGFTFNKYAMNWVRQAPGKGLEWVARIRSKYNNYATYYADSVKDRFTISRDDSKNTAYLQMNNLKTEDTAVYYCVRHGNFGNSYISYWAYWGQGTLVTVSSGGGGSGGGGSGGGGSQTVVTQEPSLTVSPGGTVTLTCGSSTGAVTSGNYPNWVQQKPGQAPRGLIGGTKFLAPGTPARFSGSLLGGKAALTLSGVQPEDEAEYYCVLWYSNRWVFGGGTKLTVL

SEQ ID NO: 461 - protein, 5 aa, Artificial Sequence
  Synthetic Polypeptide
NFDMA

SEQ ID NO: 462 - protein, 17 aa, Artificial Sequence
  Synthetic Polypeptide
SITTGGGDTYYADSVKG

SEQ ID NO: 463 - protein, 12 aa, Artificial Sequence
  Synthetic Polypeptide
HGYYDGYHLFDY

SEQ ID NO: 464 - protein, 11 aa, Artificial Sequence
  Synthetic Polypeptide
RASQGISNHLN

SEQ ID NO: 465 - protein, 7 aa, Artificial Sequence
  Synthetic Polypeptide
YTSNLQS

SEQ ID NO: 466 - protein, 9 aa, Artificial Sequence
  Synthetic Polypeptide
QQYSNLPYT

SEQ ID NO: 467 - protein, 121 aa, Artificial Sequence; identical to SEQ ID NO: 397
  Synthetic Polypeptide

SEQ ID NO: 468 - protein, 107 aa, Artificial Sequence
  Synthetic Polypeptide
DIQMTQSPSSLSASVGDRVTISCRASQGISNHLNWFQQKPGRAPKPLIYYTSNLQSGVPSRFSGSGSGTDFTLTISSLQPEDFATYYCQQYSNLPYTFGGGTKVEIK

SEQ ID NO: 469 - protein, 243 aa, Artificial Sequence
  Synthetic Polypeptide
EVQLVESGGGLVQPGGSLRLSCAASGFTFSNFDMAWVRQAPGKGLVWVSSITTGGGDTYYADSVKGRFTISRDNAKNTLYLQMNSLRAEDTAVYYCVRHGYYDGYHLFDYWGQGTLVTVSSGGGGSGGGGSGGGGSDIQMTQSPSSLSASVGDRVTISCRASQGISNHLNWFQQKPGRAPKPLIYYTSNLQSGVPSRFSGSGSGTDFTLTISSLQPEDFATYYCQQYSNLPYTFGGGTKVEIK

SEQ ID NO: 470 - protein, 498 aa, Artificial Sequence
  Synthetic Polypeptide
EVQLVESGGGLVQPGGSLRLSCAASGFTFSNFDMAWVRQAPGKGLVWVSSITTGGGDTYYADSVKGRFTISRDNAKNTLYLQMNSLRAEDTAVYYCVRHGYYDGYHLFDYWGQGTLVTVSSGGGGSGGGGSGGGGSDIQMTQSPSSLSASVGDRVTISCRASQGISNHLNWFQQKPGRAPKPLIYYTSNLQSGVPSRFSGSGSGTDFTLTISSLQPEDFATYYCQQYSNLPYTFGGGTKVEIKSGGGGSEVQLVESGGGLVQPGGSLKLSCAASGFTFNKYAMNWVRQAPGKGLEWVARIRSKYNNYATYYADSVKDRFTISRDDSKNTAYLQMNNLKTEDTAVYYCVRHGNFGNSYISYWAYWGQGTLVTVSSGGGGSGGGGSGGGGSQTVVTQEPSLTVSPGGTVTLTCGSSTGAVTSGNYPNWVQQKPGQAPRGLIGGTKFLAPGTPARFSGSLLGGKAALTLSGVQPEDEAEYYCVLWYSNRWVFGGGTKLTVL

SEQ ID NO: 471 - protein, 5 aa, Artificial Sequence
  Synthetic Polypeptide
NFDMA

SEQ ID NO: 472 - protein, 17 aa, Artificial Sequence
  Synthetic Polypeptide
SITTGGGDTYYADSVKG

SEQ ID NO: 473 - protein, 12 aa, Artificial Sequence
  Synthetic Polypeptide
HGYYDGYHLFDY

SEQ ID NO: 474 - protein, 11 aa, Artificial Sequence
  Synthetic Polypeptide
RASQGISNHLN

SEQ ID NO: 475 - protein, 7 aa, Artificial Sequence
  Synthetic Polypeptide
YTSNLQS

SEQ ID NO: 476 - protein, 9 aa, Artificial Sequence
  Synthetic Polypeptide
QQYSNLPYT

SEQ ID NO: 477 - protein, 121 aa, Artificial Sequence; identical to SEQ ID NO: 387
  Synthetic Polypeptide

SEQ ID NO: 478 - protein, 107 aa, Artificial Sequence
  Synthetic Polypeptide
DIQMTQSPSSLSASVGDRVTISCRASQGISNHLNWYQQKPGKAPKPLIYYTSNLQSGVPSRFSGSGSGTDYTLTISSLQPEDFATYYCQQYSNLPYTFGGGTKVEIK

SEQ ID NO: 479 - protein, 243 aa, Artificial Sequence
  Synthetic Polypeptide
EVQLVESGGGLVQPGGSLRLSCAASGFTFSNFDMAWVRQAPGKGLVWVSSITTGGGDTYYADSVKGRFTISRDNAKNTLYLQMDSLRAEDTAVYYCVRHGYYDGYHLFDYWGQGTLVTVSSGGGGSGGGGSGGGGSDIQMTQSPSSLSASVGDRVTISCRASQGISNHLNWYQQKPGKAPKPLIYYTSNLQSGVPSRFSGSGSGTDYTLTISSLQPEDFATYYCQQYSNLPYTFGGGTKVEIK

SEQ ID NO: 480 - protein, 498 aa, Artificial Sequence
  Synthetic Polypeptide
EVQLVESGGGLVQPGGSLRLSCAASGFTFSNFDMAWVRQAPGKGLVWVSSITTGGGDTYYADSVKGRFTISRDNAKNTLYLQMDSLRAEDTAVYYCVRHGYYDGYHLFDYWGQGTLVTVSSGGGGSGGGGSGGGGSDIQMTQSPSSLSASVGDRVTISCRASQGISNHLNWYQQKPGKAPKPLIYYTSNLQSGVPSRFSGSGSGTDYTLTISSLQPEDFATYYCQQYSNLPYTFGGGTKVEIKSGGGGSEVQLVESGGGLVQPGGSLKLSCAASGFTFNKYAMNWVRQAPGKGLEWVARIRSKYNNYATYYADSVKDRFTISRDDSKNTAYLQMNNLKTEDTAVYYCVRHGNFGNSYISYWAYWGQGTLVTVSSGGGGSGGGGSGGGGSQTVVTQEPSLTVSPGGTVTLTCGSSTGAVTSGNYPNWVQQKPGQAPRGLIGGTKFLAPGTPARFSGSLLGGKAALTLSGVQPEDEAEYYCVLWYSNRWVFGGGTKLTVL

SEQ ID NO: 481 - protein, 5 aa, Artificial Sequence
  Synthetic Polypeptide
NFDMA

SEQ ID NO: 482 - protein, 17 aa, Artificial Sequence
  Synthetic Polypeptide
SITTGGGDTYYADSVKG

SEQ ID NO: 483 - protein, 12 aa, Artificial Sequence
  Synthetic Polypeptide
HGYYDGYHLFDY

SEQ ID NO: 484 - protein, 11 aa, Artificial Sequence
  Synthetic Polypeptide
RASQGISNHLN

SEQ ID NO: 485 - protein, 7 aa, Artificial Sequence
  Synthetic Polypeptide
YTSNLQS

SEQ ID NO: 486 - protein, 9 aa, Artificial Sequence
  Synthetic Polypeptide
QQYSNLPYT

SEQ ID NO: 487 - protein, 121 aa, Artificial Sequence; identical to SEQ ID NO: 417
  Synthetic Polypeptide

SEQ ID NO: 488 - protein, 107 aa, Artificial Sequence
  Synthetic Polypeptide
DIQMTQSPSSLSASVGERVTITCRASQGISNHLNWYQQKPGKAPKSLIYYTSNLQSGVPSRFSGSGSGTDFTLTISSLQPEDFATYYCQQYSNLPYTFGGGTKVEIK

SEQ ID NO: 489 - protein, 243 aa, Artificial Sequence
  Synthetic Polypeptide
EVQLVESGGGLVQPGRSLRLSCAASGFTFSNFDMAWVRQAPAKGLEWVSSITTGGGDTYYADSVKGRFTISRDNAKNTLYLQMNSLRAEDTAVYYCVRHGYYDGYHLFDYWGQGTLVTVSSGGGGSGGGGSGGGGSDIQMTQSPSSLSASVGERVTITCRASQGISNHLNWYQQKPGKAPKSLIYYTSNLQSGVPSRFSGSGSGTDFTLTISSLQPEDFATYYCQQYSNLPYTFGGGTKVEIK

SEQ ID NO: 490 - protein, 498 aa, Artificial Sequence
  Synthetic Polypeptide
EVQLVESGGGLVQPGRSLRLSCAASGFTFSNFDMAWVRQAPAKGLEWVSSITTGGGDTYYADSVKGRFTISRDNAKNTLYLQMNSLRAEDTAVYYCVRHGYYDGYHLFDYWGQGTLVTVSSGGGGSGGGGSGGGGSDIQMTQSPSSLSASVGERVTITCRASQGISNHLNWYQQKPGKAPKSLIYYTSNLQSGVPSRFSGSGSGTDFTLTISSLQPEDFATYYCQQYSNLPYTFGGGTKVEIKSGGGGSEVQLVESGGGLVQPGGSLKLSCAASGFTFNKYAMNWVRQAPGKGLEWVARIRSKYNNYATYYADSVKDRFTISRDDSKNTAYLQMNNLKTEDTAVYYCVRHGNFGNSYISYWAYWGQGTLVTVSSGGGGSGGGGSGGGGSQTVVTQEPSLTVSPGGTVTLTCGSSTGAVTSGNYPNWVQQKPGQAPRGLIGGTKFLAPGTPARFSGSLLGGKAALTLSGVQPEDEAEYYCVLWYSNRWVFGGGTKLTVL

SEQ ID NO: 491 - protein, 5 aa, Artificial Sequence
  Synthetic Polypeptide
NFDMA

SEQ ID NO: 492 - protein, 17 aa, Artificial Sequence
  Synthetic Polypeptide
SITTGGGDTYYADSVKG

SEQ ID NO: 493 - protein, 12 aa, Artificial Sequence
  Synthetic Polypeptide
HGYYDGYHLFDY

SEQ ID NO: 494 - protein, 11 aa, Artificial Sequence
  Synthetic Polypeptide
RASQGISNNLN

SEQ ID NO: 495 - protein, 7 aa, Artificial Sequence
  Synthetic Polypeptide
YTSNLQS

SEQ ID NO: 496 - protein, 9 aa, Artificial Sequence
  Synthetic Polypeptide
QQFTSLPYT

SEQ ID NO: 497 - protein, 121 aa, Artificial Sequence; identical to SEQ ID NO: 397
  Synthetic Polypeptide

SEQ ID NO: 498 - protein, 107 aa, Artificial Sequence
  Synthetic Polypeptide
DIQMTQSPSSMSASVGDRVTITCRASQGISNNLNWYQQKPGKAPKSLIYYTSNLQSGVPSRFSGSGSGTDYTLTISSLQPEDFATYYCQQFTSLPYTFGQGTKLEIK

SEQ ID NO: 499 - protein, 243 aa, Artificial Sequence
  Synthetic Polypeptide
EVQLVESGGGLVQPGGSLRLSCAASGFTFSNFDMAWVRQAPGKGLVWVSSITTGGGDTYYADSVKGRFTISRDNAKNTLYLQMNSLRAEDTAVYYCVRHGYYDGYHLFDYWGQGTLVTVSSGGGGSGGGGSGGGGSDIQMTQSPSSMSASVGDRVTITCRASQGISNNLNWYQQKPGKAPKSLIYYTSNLQSGVPSRFSGSGSGTDYTLTISSLQPEDFATYYCQQFTSLPYTFGQGTKLEIK

SEQ ID NO: 500 - protein, 498 aa, Artificial Sequence
  Synthetic Polypeptide
EVQLVESGGGLVQPGGSLRLSCAASGFTFSNFDMAWVRQAPGKGLVWVSSITTGGGDTYYADSVKGRFTISRDNAKNTLYLQMNSLRAEDTAVYYCVRHGYYDGYHLFDYWGQGTLVTVSSGGGGSGGGGSGGGGSDIQMTQSPSSMSASVGDRVTITCRASQGISNNLNWYQQKPGKAPKSLIYYTSNLQSGVPSRFSGSGSGTDYTLTISSLQPEDFATYYCQQFTSLPYTFGQGTKLEIKSGGGGSEVQLVESGGGLVQPGGSLKLSCAASGFTFNKYAMNWVRQAPGKGLEWVARIRSKYNNYATYYADSVKDRFTISRDDSKNTAYLQMNNLKTEDTAVYYCVRHGNFGNSYISYWAYWGQGTLVTVSSGGGGSGGGGSGGGGSQTVVTQEPSLTVSPGGTVTLTCGSSTGAVTSGNYPNWVQQKPGQAPRGLIGGTKFLAPGTPARFSGSLLGGKAALTLSGVQPEDEAEYYCVLWYSNRWVFGGGTKLTVL

SEQ ID NO: 501 - protein, 5 aa, Artificial Sequence
  Synthetic Polypeptide
NFDMA

SEQ ID NO: 502 - protein, 17 aa, Artificial Sequence
  Synthetic Polypeptide
SITTGGGDTYYADSVKG

SEQ ID NO: 503 - protein, 12 aa, Artificial Sequence
  Synthetic Polypeptide
HGYYDGYHLFDY

SEQ ID NO: 504 - protein, 11 aa, Artificial Sequence
  Synthetic Polypeptide
RANQGISNNLN

SEQ ID NO: 505 - protein, 7 aa, Artificial Sequence
  Synthetic Polypeptide
YTSNLQS

SEQ ID NO: 506 - protein, 9 aa, Artificial Sequence
  Synthetic Polypeptide
QQFTSLPYT

SEQ ID NO: 507 - protein, 121 aa, Artificial Sequence
  Synthetic Polypeptide
EVQLVESGGGLVQPGGSLRLSCAASGFTFSNFDMAWVRQAPGKGLVWVSSITTGGGDTYYADSVKGRFTISRDNAKSTLYLQMDSLRSEDTAVYYCVRHGYYDGYHLFDYWGQGTLVTVSS

SEQ ID NO: 508 - protein, 107 aa, Artificial Sequence
  Synthetic Polypeptide
DIQMTQSPSSLSASVGDRVTITCRANQGISNNLNWYQQKPGKAPKPLIYYTSNLQSGVPSRFSGSGSGTDYTLTISSLQPEDFATYYCQQFTSLPYTFGQGTKLEIK

SEQ ID NO: 509 - protein, 243 aa, Artificial Sequence
  Synthetic Polypeptide
EVQLVESGGGLVQPGGSLRLSCAASGFTFSNFDMAWVRQAPGKGLVWVSSITTGGGDTYYADSVKGRFTISRDNAKSTLYLQMDSLRSEDTAVYYCVRHGYYDGYHLFDYWGQGTLVTVSSGGGGSGGGGSGGGGSDIQMTQSPSSLSASVGDRVTITCRANQGISNNLNWYQQKPGKAPKPLIYYTSNLQSGVPSRFSGSGSGTDYTLTISSLQPEDFATYYCQQFTSLPYTFGQGTKLEIK

SEQ ID NO: 510 - protein, 498 aa, Artificial Sequence
  Synthetic Polypeptide
EVQLVESGGGLVQPGGSLRLSCAASGFTFSNFDMAWVRQAPGKGLVWVSSITTGGGDTYYADSVKGRFTISRDNAKSTLYLQMDSLRSEDTAVYYCVRHGYYDGYHLFDYWGQGTLVTVSSGGGGSGGGGSGGGGSDIQMTQSPSSLSASVGDRVTITCRANQGISNNLNWYQQKPGKAPKPLIYYTSNLQSGVPSRFSGSGSGTDYTLTISSLQPEDFATYYCQQFTSLPYTFGQGTKLEIKSGGGGSEVQLVESGGGLVQPGGSLKLSCAASGFTFNKYAMNWVRQAPGKGLEWVARIRSKYNNYATYYADSVKDRFTISRDDSKNTAYLQMNNLKTEDTAVYYCVRHGNFGNSYISYWAYWGQGTLVTVSSGGGGSGGGGSGGGGSQTVVTQEPSLTVSPGGTVTLTCGSSTGAVTSGNYPNWVQQKPGQAPRGLIGGTKFLAPGTPARFSGSLLGGKAALTLSGVQPEDEAEYYCVLWYSNRWVFGGGTKLTVL

SEQ ID NO: 511 - protein, 5 aa, Artificial Sequence
  Synthetic Polypeptide
NFDMA

SEQ ID NO: 512 - protein, 17 aa, Artificial Sequence
  Synthetic Polypeptide
SITTGGGDTYYADSVKG

SEQ ID NO: 513 - protein, 12 aa, Artificial Sequence
  Synthetic Polypeptide
HGYYDGYHLFDY

SEQ ID NO: 514 - protein, 11 aa, Artificial Sequence
  Synthetic Polypeptide
RASQGISNNLN

SEQ ID NO: 515 - protein, 7 aa, Artificial Sequence
  Synthetic Polypeptide
YTSNLQS

SEQ ID NO: 516 - protein, 9 aa, Artificial Sequence
  Synthetic Polypeptide
QQFTSLPYT

SEQ ID NO: 517 - protein, 121 aa, Artificial Sequence; identical to SEQ ID NO: 407
  Synthetic Polypeptide

SEQ ID NO: 518 - protein, 107 aa, Artificial Sequence; identical to SEQ ID NO: 498
  Synthetic Polypeptide

SEQ ID NO: 519 - protein, 243 aa, Artificial Sequence
  Synthetic Polypeptide
EVQLVESGGGLVQPGGSLRLSCAASGFTFSNFDMAWVRQAPGKGLVWVSSITTGGGDTYYADSVKGRFTISRDNAKNTLYLQMDSLRSEDTAVYYCVRHGYYDGYHLFDYWGQGTLVTVSSGGGGSGGGGSGGGGSDIQMTQSPSSMSASVGDRVTITCRASQGISNNLNWYQQKPGKAPKSLIYYTSNLQSGVPSRFSGSGSGTDYTLTISSLQPEDFATYYCQQFTSLPYTFGQGTKLEIK

SEQ ID NO: 520 - protein, 498 aa, Artificial Sequence
  Synthetic Polypeptide
EVQLVESGGGLVQPGGSLRLSCAASGFTFSNFDMAWVRQAPGKGLVWVSSITTGGGDTYYADSVKGRFTISRDNAKNTLYLQMDSLRSEDTAVYYCVRHGYYDGYHLFDYWGQGTLVTVSSGGGGSGGGGSGGGGSDIQMTQSPSSMSASVGDRVTITCRASQGISNNLNWYQQKPGKAPKSLIYYTSNLQSGVPSRFSGSGSGTDYTLTISSLQPEDFATYYCQQFTSLPYTFGQGTKLEIKSGGGGSEVQLVESGGGLVQPGGSLKLSCAASGFTFNKYAMNWVRQAPGKGLEWVARIRSKYNNYATYYADSVKDRFTISRDDSKNTAYLQMNNLKTEDTAVYYCVRHGNFGNSYISYWAYWGQGTLVTVSSGGGGSGGGGSGGGGSQTVVTQEPSLTVSPGGTVTLTCGSSTGAVTSGNYPNWVQQKPGQAPRGLIGGTKFLAPGTPARFSGSLLGGKAALTLSGVQPEDEAEYYCVLWYSNRWVFGGGTKLTVL

SEQ ID NO: 521 - protein, 5 aa, Artificial Sequence
  Synthetic Polypeptide
NFDMA

SEQ ID NO: 522 - protein, 17 aa, Artificial Sequence
  Synthetic Polypeptide
SITTGGGDTYYADSVKG

SEQ ID NO: 523 - protein, 12 aa, Artificial Sequence
  Synthetic Polypeptide
HGYYDGYHLFDY

SEQ ID NO: 524 - protein, 11 aa, Artificial Sequence
  Synthetic Polypeptide
RASQGISNNLN

SEQ ID NO: 525 - protein, 7 aa, Artificial Sequence
  Synthetic Polypeptide
YTSNLQS

SEQ ID NO: 526 - protein, 9 aa, Artificial Sequence
  Synthetic Polypeptide
QQFAHLPYT

SEQ ID NO: 527 - protein, 121 aa, Artificial Sequence; identical to SEQ ID NO: 407
  Synthetic Polypeptide

SEQ ID NO: 528 - protein, 107 aa, Artificial Sequence
  Synthetic Polypeptide
DIQMTQSPSSMSASVGDRVTITCRASQGISNNLNWYQQKPGKAPKSLIYYTSNLQSGVPSRFSGSGSGTDYTLTISSLQPEDFATYYCQQFAHLPYTFGQGTKLEIK

SEQ ID NO: 529 - protein, 243 aa, Artificial Sequence
  Synthetic Polypeptide
EVQLVESGGGLVQPGGSLRLSCAASGFTFSNFDMAWVRQAPGKGLVWVSSITTGGGDTYYADSVKGRFTISRDNAKNTLYLQMDSLRSEDTAVYYCVRHGYYDGYHLFDYWGQGTLVTVSSGGGGSGGGGSGGGGSDIQMTQSPSSMSASVGDRVTITCRASQGISNNLNWYQQKPGKAPKSLIYYTSNLQSGVPSRFSGSGSGTDYTLTISSLQPEDFATYYCQQFAHLPYTFGQGTKLEIK

SEQ ID NO: 530 - protein, 498 aa, Artificial Sequence
  Synthetic Polypeptide
EVQLVESGGGLVQPGGSLRLSCAASGFTFSNFDMAWVRQAPGKGLVWVSSITTGGGDTYYADSVKGRFTISRDNAKNTLYLQMDSLRSEDTAVYYCVRHGYYDGYHLFDYWGQGTLVTVSSGGGGSGGGGSGGGGSDIQMTQSPSSMSASVGDRVTITCRASQGISNNLNWYQQKPGKAPKSLIYYTSNLQSGVPSRFSGSGSGTDYTLTISSLQPEDFATYYCQQFAHLPYTFGQGTKLEIKSGGGGSEVQLVESGGGLVQPGGSLKLSCAASGFTFNKYAMNWVRQAPGKGLEWVARIRSKYNNYATYYADSVKDRFTISRDDSKNTAYLQMNNLKTEDTAVYYCVRHGNFGNSYISYWAYWGQGTLVTVSSGGGGSGGGGSGGGGSQTVVTQEPSLTVSPGGTVTLTCGSSTGAVTSGNYPNWVQQKPGQAPRGLIGGTKFLAPGTPARFSGSLLGGKAALTLSGVQPEDEAEYYCVLWYSNRWVFGGGTKLTVL

SEQ ID NO: 531 - protein, 14 aa, Artificial Sequence
  Synthetic Polypeptide
GSSTGAVTSGYYPN

SEQ ID NO: 532 - protein, 7 aa, Artificial Sequence
  Synthetic Polypeptide
GTKFLAP

SEQ ID NO: 533 - protein, 9 aa, Artificial Sequence
  Synthetic Polypeptide
ALWYSNRWV

SEQ ID NO: 534 - protein, 5 aa, Artificial Sequence
  Synthetic Polypeptide
IYAMN

SEQ ID NO: 535 - protein, 19 aa, Artificial Sequence
  Synthetic Polypeptide
RIRSKYNNYATYYADSVKS

SEQ ID NO: 536 - protein, 14 aa, Artificial Sequence
  Synthetic Polypeptide
HGNFGNSYVSFFAY

SEQ ID NO: 537 - protein, 125 aa, Artificial Sequence
  Synthetic Polypeptide
EVQLVESGGGLVQPGGSLKLSCAASGFTFNIYAMNWVRQAPGKGLEWVARIRSKYNNYATYYADSVKSRFTISRDDSKNTAYLQMNNLKTEDTAVYYCVRHGNFGNSYVSFFAYWGQGTLVTVSS

SEQ ID NO: 538 - protein, 125 aa, Artificial Sequence
  Synthetic Polypeptide
EVQLLESGGGLVQPGGSLKLSCAASGFTFNIYAMNWVRQAPGKGLEWVARIRSKYNNYATYYADSVKSRFTISRDDSKNTAYLQMNNLKTEDTAVYYCVRHGNFGNSYVSFFAYWGQGTLVTVSS

SEQ ID NO: 539 - protein, 109 aa, Artificial Sequence
  Synthetic Polypeptide
QTVVTQEPSLTVSPGGTVTLTCGSSTGAVTSGYYPNWVQQKPGQAPRGLIGGTKFLAPGTPARFSGSLLGGKAALTLSGVQPEDEAEYYCALWYSNRWVFGGGTKLTVL

SEQ ID NO: 540 - protein, 249 aa, Artificial Sequence
  Synthetic Polypeptide
EVQLVESGGGLVQPGGSLKLSCAASGFTFNIYAMNWVRQAPGKGLEWVARIRSKYNNYATYYADSVKSRFTISRDDSKNTAYLQMNNLKTEDTAVYYCVRHGNFGNSYVSFFAYWGQGTLVTVSSGGGGSGGGGSGGGGSQTVVTQEPSLTVSPGGTVTLTCGSSTGAVTSGYYPNWVQQKPGQAPRGLIGGTKFLAPGTPARFSGSLLGGKAALTLSGVQPEDEAEYYCALWYSNRWVFGGGTKLTVL

SEQ ID NO: 541 - protein, 249 aa, Artificial Sequence
  Synthetic Polypeptide
EVQLLESGGGLVQPGGSLKLSCAASGFTFNIYAMNWVRQAPGKGLEWVARIRSKYNNYATYYADSVKSRFTISRDDSKNTAYLQMNNLKTEDTAVYYCVRHGNFGNSYVSFFAYWGQGTLVTVSSGGGGSGGGGSGGGGSELVVTQEPSLTVSPGGTVTLTCGSSTGAVTSGYYPNWVQQKPGQAPRGLIGGTKFLAPGTPARFSGSLLGGKAALTLSGVQPEDEAEYYCALWYSNRWVFGGGTKLTVL

SEQ ID NO: 542 - protein, 14 aa, Artificial Sequence
  Synthetic Polypeptide
GSSTGAVTSGYYPN

SEQ ID NO: 543 - protein, 7 aa, Artificial Sequence
  Synthetic Polypeptide
GTKFLAP

SEQ ID NO: 544 - protein, 9 aa, Artificial Sequence
  Synthetic Polypeptide
ALWYSNRWV

SEQ ID NO: 545 - protein, 5 aa, Artificial Sequence
  Synthetic Polypeptide
KYAMN

SEQ ID NO: 546 - protein, 19 aa, Artificial Sequence
  Synthetic Polypeptide
RIRSKYNNYATYYADSVKD

SEQ ID NO: 547 - protein, 14 aa, Artificial Sequence
  Synthetic Polypeptide
HGNFGNSYISYWAY

SEQ ID NO: 548 - protein, 125 aa, Artificial Sequence
  Synthetic Polypeptide
EVQLVESGGGLVQPGGSLKLSCAASGFTFNKYAMNWVRQAPGKGLEWVARIRSKYNNYATYYADSVKDRFTISRDDSKNTAYLQMNNLKTEDTAVYYCVRHGNFGNSYISYWAYWGQGTLVTVSS

SEQ ID NO: 549 - protein, 125 aa, Artificial Sequence
  Synthetic Polypeptide
EVQLLESGGGLVQPGGSLKLSCAASGFTFNKYAMNWVRQAPGKGLEWVARIRSKYNNYATYYADSVKDRFTISRDDSKNTAYLQMNNLKTEDTAVYYCVRHGNFGNSYISYWAYWGQGTLVTVSS

SEQ ID NO: 550 - protein, 109 aa, Artificial Sequence; identical to SEQ ID NO: 539
  Synthetic Polypeptide

SEQ ID NO: 551 - protein, 109 aa, Artificial Sequence
  Synthetic Polypeptide
ELVVTQEPSLTVSPGGTVTLTCGSSTGAVTSGYYPNWVQQKPGQAPRGLIGGTKFLAPGTPARFSGSLLGGKAALTLSGVQPEDEAEYYCALWYSNRWVFGGGTKLTVL

SEQ ID NO: 552 - protein, 249 aa, Artificial Sequence
  Synthetic Polypeptide
EVQLVESGGGLVQPGGSLKLSCAASGFTFNKYAMNWVRQAPGKGLEWVARIRSKYNNYATYYADSVKDRFTISRDDSKNTAYLQMNNLKTEDTAVYYCVRHGNFGNSYISYWAYWGQGTLVTVSSGGGGSGGGGSGGGGSQTVVTQEPSLTVSPGGTVTLTCGSSTGAVTSGYYPNWVQQKPGQAPRGLIGGTKFLAPGTPARFSGSLLGGKAALTLSGVQPEDEAEYYCALWYSNRWVFGGGTKLTVL

SEQ ID NO: 553 - protein, 249 aa, Artificial Sequence
  Synthetic Polypeptide
EVQLLESGGGLVQPGGSLKLSCAASGFTFNKYAMNWVRQAPGKGLEWVARIRSKYNNYATYYADSVKDRFTISRDDSKNTAYLQMNNLKTEDTAVYYCVRHGNFGNSYISYWAYWGQGTLVTVSSGGGGSGGGGSGGGGSELVVTQEPSLTVSPGGTVTLTCGSSTGAVTSGYYPNWVQQKPGQAPRGLIGGTKFLAPGTPARFSGSLLGGKAALTLSGVQPEDEAEYYCALWYSNRWVFGGGTKLTVL

SEQ ID NO: 554 - protein, 14 aa, Artificial Sequence
  Synthetic Polypeptide
GSSTGAVTSGYYPN

SEQ ID NO: 555 - protein, 7 aa, Artificial Sequence
  Synthetic Polypeptide
GTKFLAP

SEQ ID NO: 556 - protein, 9 aa, Artificial Sequence
  Synthetic Polypeptide
ALWYSNRWV

SEQ ID NO: 557 - protein, 5 aa, Artificial Sequence
  Synthetic Polypeptide
SYAMN

SEQ ID NO: 558 - protein, 19 aa, Artificial Sequence
  Synthetic Polypeptide
RIRSKYNNYATYYADSVKG

SEQ ID NO: 559 - protein, 14 aa, Artificial Sequence
  Synthetic Polypeptide
HGNFGNSYLSFWAY

SEQ ID NO: 560 - protein, 125 aa, Artificial Sequence
  Synthetic Polypeptide
EVQLVESGGGLEQPGGSLKLSCAASGFTFNSYAMNWVRQAPGKGLEWVARIRSKYNNYATYYADSVKGRFTISRDDSKNTAYLQMNNLKTEDTAVYYCVRHGNFGNSYLSFWAYWGQGTLVTVSS

SEQ ID NO: 561 - protein, 125 aa, Artificial Sequence
  Synthetic Polypeptide
EVQLLESGGGLEQPGGSLKLSCAASGFTFNSYAMNWVRQAPGKGLEWVARIRSKYNNYATYYADSVKGRFTISRDDSKNTAYLQMNNLKTEDTAVYYCVRHGNFGNSYLSFWAYWGQGTLVTVSS

SEQ ID NO: 562 - protein, 109 aa, Artificial Sequence; identical to SEQ ID NO: 539
  Synthetic Polypeptide

SEQ ID NO: 563 - protein, 249 aa, Artificial Sequence
  Synthetic Polypeptide
EVQLVESGGGLEQPGGSLKLSCAASGFTFNSYAMNWVRQAPGKGLEWVARIRSKYNNYATYYADSVKGRFTISRDDSKNTAYLQMNNLKTEDTAVYYCVRHGNFGNSYLSFWAYWGQGTLVTVSSGGGGSGGGGSGGGGSQTVVTQEPSLTVSPGGTVTLTCGSSTGAVTSGYYPNWVQQKPGQAPRGLIGGTKFLAPGTPARFSGSLLGGKAALTLSGVQPEDEAEYYCALWYSNRWVFGGGTKLTVL

SEQ ID NO: 564 - protein, 249 aa, Artificial Sequence
  Synthetic Polypeptide
EVQLLESGGGLEQPGGSLKLSCAASGFTFNSYAMNWVRQAPGKGLEWVARIRSKYNNYATYYADSVKGRFTISRDDSKNTAYLQMNNLKTEDTAVYYCVRHGNFGNSYLSFWAYWGQGTLVTVSSGGGGSGGGGSGGGGSELVVTQEPSLTVSPGGTVTLTCGSSTGAVTSGYYPNWVQQKPGQAPRGLIGGTKFLAPGTPARFSGSLLGGKAALTLSGVQPEDEAEYYCALWYSNRWVFGGGTKLTVL

SEQ ID NO: 565 - protein, 14 aa, Artificial Sequence
  Synthetic Polypeptide
GSSTGAVTSGYYPN

SEQ ID NO: 566 - protein, 7 aa, Artificial Sequence
  Synthetic Polypeptide
GTKFLAP

SEQ ID NO: 567 - protein, 9 aa, Artificial Sequence
  Synthetic Polypeptide
ALWYSNRWV

SEQ ID NO: 568 - protein, 5 aa, Artificial Sequence
  Synthetic Polypeptide
RYAMN

SEQ ID NO: 569 - protein, 19 aa, Artificial Sequence
  Synthetic Polypeptide
RIRSKYNNYATYYADSVKG

SEQ ID NO: 570 - protein, 14 aa, Artificial Sequence
  Synthetic Polypeptide
HGNFGNSYLSYFAY

SEQ ID NO: 571 - protein, 125 aa, Artificial Sequence
  Synthetic Polypeptide
EVQLVESGGGLVQPGGSLKLSCAASGFTFNRYAMNWVRQAPGKGLEWVARIRSKYNNYATYYADSVKGRFTISRDDSKNTAYLQMNNLKTEDTAVYYCVRHGNFGNSYLSYFAYWGQGTLVTVSS

SEQ ID NO: 572 - protein, 125 aa, Artificial Sequence
  Synthetic Polypeptide
EVQLLESGGGLVQPGGSLKLSCAASGFTFNRYAMNWVRQAPGKGLEWVARIRSKYNNYATYYADSVKGRFTISRDDSKNTAYLQMNNLKTEDTAVYYCVRHGNFGNSYLSYFAYWGQGTLVTVSS

SEQ ID NO: 573 - protein, 109 aa, Artificial Sequence; identical to SEQ ID NO: 539
  Synthetic Polypeptide

SEQ ID NO: 574 - protein, 249 aa, Artificial Sequence
  Synthetic Polypeptide
EVQLVESGGGLVQPGGSLKLSCAASGFTFNRYAMNWVRQAPGKGLEWVARIRSKYNNYATYYADSVKGRFTISRDDSKNTAYLQMNNLKTEDTAVYYCVRHGNFGNSYLSYFAYWGQGTLVTVSSGGGGSGGGGSGGGGSQTVVTQEPSLTVSPGGTVTLTCGSSTGAVTSGYYPNWVQQKPGQAPRGLIGGTKFLAPGTPARFSGSLLGGKAALTLSGVQPEDEAEYYCALWYSNRWVFGGGTKLTVL

SEQ ID NO: 575 - protein, 249 aa, Artificial Sequence
  Synthetic Polypeptide
EVQLLESGGGLVQPGGSLKLSCAASGFTFNRYAMNWVRQAPGKGLEWVARIRSKYNNYATYYADSVKGRFTISRDDSKNTAYLQMNNLKTEDTAVYYCVRHGNFGNSYLSYFAYWGQGTLVTVSSGGGGSGGGGSGGGGSELVVTQEPSLTVSPGGTVTLTCGSSTGAVTSGYYPNWVQQKPGQAPRGLIGGTKFLAPGTPARFSGSLLGGKAALTLSGVQPEDEAEYYCALWYSNRWVFGGGTKLTVL

SEQ ID NO: 576 - protein, 14 aa, Artificial Sequence
  Synthetic Polypeptide
RSSTGAVTSGYYPN

SEQ ID NO: 577 - protein, 7 aa, Artificial Sequence
  Synthetic Polypeptide
ATDMRPS

SEQ ID NO: 578 - protein, 9 aa, Artificial Sequence
  Synthetic Polypeptide
ALWYSNRWV

SEQ ID NO: 579 - protein, 5 aa, Artificial Sequence
  Synthetic Polypeptide
VYAMN

SEQ ID NO: 580 - protein, 19 aa, Artificial Sequence
  Synthetic Polypeptide
RIRSKYNNYATYYADSVKK

SEQ ID NO: 581 - protein, 14 aa, Artificial Sequence
  Synthetic Polypeptide
HGNFGNSYLSWWAY

SEQ ID NO: 582 - protein, 125 aa, Artificial Sequence
  Synthetic Polypeptide
EVQLVESGGGLVQPGGSLKLSCAASGFTFNVYAMNWVRQAPGKGLEWVARIRSKYNNYATYYADSVKKRFTISRDDSKNTAYLQMNNLKTEDTAVYYCVRHGNFGNSYLSWWAYWGQGTLVTVSS

SEQ ID NO: 583 - protein, 125 aa, Artificial Sequence
  Synthetic Polypeptide
EVQLLESGGGLVQPGGSLKLSCAASGFTFNVYAMNWVRQAPGKGLEWVARIRSKYNNYATYYADSVKKRFTISRDDSKNTAYLQMNNLKTEDTAVYYCVRHGNFGNSYLSWWAYWGQGTLVTVSS

SEQ ID NO: 584 - protein, 109 aa, Artificial Sequence
  Synthetic Polypeptide
QTVVTQEPSLTVSPGGTVTLTCRSSTGAVTSGYYPNWVQQKPGQAPRGLIGATDMRPSGTPARFSGSLLGGKAALTLSGVQPEDEAEYYCALWYSNRWVFGGGTKLTVL

SEQ ID NO: 585 - protein, 109 aa, Artificial Sequence
  Synthetic Polypeptide
ELVVTQEPSLTVSPGGTVTLTCRSSTGAVTSGYYPNWVQQKPGQAPRGLIGATDMRPSGTPARFSGSLLGGKAALTLSGVQPEDEAEYYCALWYSNRWVFGGGTKLTVL

SEQ ID NO: 586 - protein, 249 aa, Artificial Sequence
  Synthetic Polypeptide
EVQLVESGGGLVQPGGSLKLSCAASGFTFNVYAMNWVRQAPGKGLEWVARIRSKYNNYATYYADSVKKRFTISRDDSKNTAYLQMNNLKTEDTAVYYCVRHGNFGNSYLSWWAYWGQGTLVTVSSGGGGSGGGGSGGGGSQTVVTQEPSLTVSPGGTVTLTCRSSTGAVTSGYYPNWVQQKPGQAPRGLIGATDMRPSGTPARFSGSLLGGKAALTLSGVQPEDEAEYYCALWYSNRWVFGGGTKLTVL

SEQ ID NO: 587 - protein, 249 aa, Artificial Sequence
  Synthetic Polypeptide
EVQLLESGGGLVQPGGSLKLSCAASGFTFNVYAMNWVRQAPGKGLEWVARIRSKYNNYATYYADSVKKRFTISRDDSKNTAYLQMNNLKTEDTAVYYCVRHGNFGNSYLSWWAYWGQGTLVTVSSGGGGSGGGGSGGGGSELVVTQEPSLTVSPGGTVTLTCRSSTGAVTSGYYPNWVQQKPGQAPRGLIGATDMRPSGTPARFSGSLLGGKAALTLSGVQPEDEAEYYCALWYSNRWVFGGGTKLTVL

SEQ ID NO: 588 - protein, 14 aa, Artificial Sequence
  Synthetic Polypeptide
GSSTGAVTSGYYPN

SEQ ID NO: 589 - protein, 7 aa, Artificial Sequence
  Synthetic Polypeptide
GTKFLAP

SEQ ID NO: 590 - protein, 9 aa, Artificial Sequence
  Synthetic Polypeptide
ALWYSNRWV

SEQ ID NO: 591 - protein, 5 aa, Artificial Sequence
  Synthetic Polypeptide
KYAMN

SEQ ID NO: 592 - protein, 19 aa, Artificial Sequence
  Synthetic Polypeptide
RIRSKYNNYATYYADSVKS

SEQ ID NO: 593 - protein, 14 aa, Artificial Sequence
  Synthetic Polypeptide
HGNFGNSYTSYYAY

SEQ ID NO: 594 - protein, 125 aa, Artificial Sequence
  Synthetic Polypeptide
EVQLVESGGGLVQPGGSLKLSCAASGFTFNKYAMNWVRQAPGKGLEWVARIRSKYNNYATYYADSVKSRFTISRDDSKNTAYLQMNNLKTEDTAVYYCVRHGNFGNSYTSYYAYWGQGTLVTVSS

SEQ ID NO: 595 - protein, 125 aa, Artificial Sequence
  Synthetic Polypeptide
EVQLLESGGGLVQPGGSLKLSCAASGFTFNKYAMNWVRQAPGKGLEWVARIRSKYNNYATYYADSVKSRFTISRDDSKNTAYLQMNNLKTEDTAVYYCVRHGNFGNSYTSYYAYWGQGTLVTVSS

SEQ ID NO: 596 - protein, 109 aa, Artificial Sequence; identical to SEQ ID NO: 539
  Synthetic Polypeptide

SEQ ID NO: 597 - protein, 249 aa, Artificial Sequence
  Synthetic Polypeptide
EVQLVESGGGLVQPGGSLKLSCAASGFTFNKYAMNWVRQAPGKGLEWVARIRSKYNNYATYYADSVKSRFTISRDDSKNTAYLQMNNLKTEDTAVYYCVRHGNFGNSYTSYYAYWGQGTLVTVSSGGGGSGGGGSGGGGSQTVVTQEPSLTVSPGGTVTLTCGSSTGAVTSGYYPNWVQQKPGQAPRGLIGGTKFLAPGTPARFSGSLLGGKAALTLSGVQPEDEAEYYCALWYSNRWVFGGGTKLTVL

SEQ ID NO: 598 - protein, 249 aa, Artificial Sequence
  Synthetic Polypeptide
EVQLLESGGGLVQPGGSLKLSCAASGFTFNKYAMNWVRQAPGKGLEWVARIRSKYNNYATYYADSVKSRFTISRDDSKNTAYLQMNNLKTEDTAVYYCVRHGNFGNSYTSYYAYWGQGTLVTVSSGGGGSGGGGSGGGGSELVVTQEPSLTVSPGGTVTLTCGSSTGAVTSGYYPNWVQQKPGQAPRGLIGGTKFLAPGTPARFSGSLLGGKAALTLSGVQPEDEAEYYCALWYSNRWVFGGGTKLTVL

SEQ ID NO: 599 - protein, 14 aa, Artificial Sequence
  Synthetic Polypeptide
RSSTGAVTSGYYPN

SEQ ID NO: 600 - protein, 7 aa, Artificial Sequence
  Synthetic Polypeptide
ATDMRPS

SEQ ID NO: 601 - protein, 9 aa, Artificial Sequence
  Synthetic Polypeptide
ALWYSNRWV

SEQ ID NO: 602 - protein, 5 aa, Artificial Sequence
  Synthetic Polypeptide
GYAMN

SEQ ID NO: 603 - protein, 19 aa, Artificial Sequence
  Synthetic Polypeptide
RIRSKYNNYATYYADSVKE

SEQ ID NO: 604 - protein, 14 aa, Artificial Sequence
  Synthetic Polypeptide
HRNFGNSYLSWFAY

SEQ ID NO: 605 - protein, 125 aa, Artificial Sequence
  Synthetic Polypeptide
EVQLVESGGGLVQPGGSLKLSCAASGFTFNGYAMNWVRQAPGKGLEWVARIRSKYNNYATYYADSVKERFTISRDDSKNTAYLQMNNLKTEDTAVYYCVRHRNFGNSYLSWFAYWGQGTLVTVSS

SEQ ID NO: 606 - protein, 125 aa, Artificial Sequence
  Synthetic Polypeptide
EVQLLESGGGLVQPGGSLKLSCAASGFTFNGYAMNWVRQAPGKGLEWVARIRSKYNNYATYYADSVKERFTISRDDSKNTAYLQMNNLKTEDTAVYYCVRHRNFGNSYLSWFAYWGQGTLVTVSS

SEQ ID NO: 607 - protein, 109 aa, Artificial Sequence; identical to SEQ ID NO: 584
  Synthetic Polypeptide

SEQ ID NO: 608 - protein, 249 aa, Artificial Sequence
  Synthetic Polypeptide
EVQLVESGGGLVQPGGSLKLSCAASGFTFNGYAMNWVRQAPGKGLEWVARIRSKYNNYATYYADSVKERFTISRDDSKNTAYLQMNNLKTEDTAVYYCVRHRNFGNSYLSWFAYWGQGTLVTVSSGGGGSGGGGSGGGGSQTVVTQEPSLTVSPGGTVTLTCRSSTGAVTSGYYPNWVQQKPGQAPRGLIGATDMRPSGTPARFSGSLLGGKAALTLSGVQPEDEAEYYCALWYSNRWVFGGGTKLTVL

SEQ ID NO: 609 - protein, 249 aa, Artificial Sequence
  Synthetic Polypeptide
EVQLLESGGGLVQPGGSLKLSCAASGFTFNGYAMNWVRQAPGKGLEWVARIRSKYNNYATYYADSVKERFTISRDDSKNTAYLQMNNLKTEDTAVYYCVRHRNFGNSYLSWFAYWGQGTLVTVSSGGGGSGGGGSGGGGSELVVTQEPSLTVSPGGTVTLTCRSSTGAVTSGYYPNWVQQKPGQAPRGLIGATDMRPSGTPARFSGSLLGGKAALTLSGVQPEDEAEYYCALWYSNRWVFGGGTKLTVL

SEQ ID NO: 610 - protein, 14 aa, Artificial Sequence
  Synthetic Polypeptide
GSSTGAVTSGYYPN

SEQ ID NO: 611 - protein, 7 aa, Artificial Sequence
  Synthetic Polypeptide
GTKFLAP

SEQ ID NO: 612 - protein, 9 aa, Artificial Sequence
  Synthetic Polypeptide
ALWYSNRWV

SEQ ID NO: 613 - protein, 5 aa, Artificial Sequence
  Synthetic Polypeptide
VYAMN

SEQ ID NO: 614 - protein, 19 aa, Artificial Sequence
  Synthetic Polypeptide
RIRSKYNNYATYYADSVKK

SEQ ID NO: 615 - protein, 14 aa, Artificial Sequence
  Synthetic Polypeptide
HGNFGNSYISWWAY

SEQ ID NO: 616 - protein, 125 aa, Artificial Sequence
  Synthetic Polypeptide
EVQLVESGGGLVQPGGSLKLSCAASGFTFNVYAMNWVRQAPGKGLEWVARIRSKYNNYATYYADSVKKRFTISRDDSKNTAYLQMNNLKTEDTAVYYCVRHGNFGNSYISWWAYWGQGTLVTVSS

SEQ ID NO: 617 - protein, 125 aa, Artificial Sequence
  Synthetic Polypeptide
EVQLLESGGGLVQPGGSLKLSCAASGFTFNVYAMNWVRQAPGKGLEWVARIRSKYNNYATYYADSVKKRFTISRDDSKNTAYLQMNNLKTEDTAVYYCVRHGNFGNSYISWWAYWGQGTLVTVSS

SEQ ID NO: 618 - protein, 109 aa, Artificial Sequence; identical to SEQ ID NO: 539
  Synthetic Polypeptide

SEQ ID NO: 619 - protein, 249 aa, Artificial Sequence
  Synthetic Polypeptide
EVQLVESGGGLVQPGGSLKLSCAASGFTFNVYAMNWVRQAPGKGLEWVARIRSKYNNYATYYADSVKKRFTISRDDSKNTAYLQMNNLKTEDTAVYYCVRHGNFGNSYISWWAYWGQGTLVTVSSGGGGSGGGGSGGGGSQTVVTQEPSLTVSPGGTVTLTCGSSTGAVTSGYYPNWVQQKPGQAPRGLIGGTKFLAPGTPARFSGSLLGGKAALTLSGVQPEDEAEYYCALWYSNRWVFGGGTKLTVL

SEQ ID NO: 620 - protein, 249 aa, Artificial Sequence
  Synthetic Polypeptide
EVQLLESGGGLVQPGGSLKLSCAASGFTFNVYAMNWVRQAPGKGLEWVARIRSKYNNYATYYADSVKKRFTISRDDSKNTAYLQMNNLKTEDTAVYYCVRHGNFGNSYISWWAYWGQGTLVTVSSGGGGSGGGGSGGGGSELVVTQEPSLTVSPGGTVTLTCGSSTGAVTSGYYPNWVQQKPGQAPRGLIGGTKFLAPGTPARFSGSLLGGKAALTLSGVQPEDEAEYYCALWYSNRWVFGGGTKLTVL

SEQ ID NO: 621 - protein, 14 aa, Artificial Sequence
  Synthetic Polypeptide
GSSTGAVTSGNYPN

SEQ ID NO: 622 - protein, 7 aa, Artificial Sequence
  Synthetic Polypeptide
GTKFLAP

SEQ ID NO: 623 - protein, 9 aa, Artificial Sequence
  Synthetic Polypeptide
VLWYSNRWV

SEQ ID NO: 624 - protein, 5 aa, Artificial Sequence
  Synthetic Polypeptide
SYAMN

SEQ ID NO: 625 - protein, 19 aa, Artificial Sequence
  Synthetic Polypeptide
RIRSKYNNYATYYADSVKG

SEQ ID NO: 626 - protein, 14 aa, Artificial Sequence
  Synthetic Polypeptide
HGNFGNSYVSWWAY

SEQ ID NO: 627 - protein, 125 aa, Artificial Sequence
  Synthetic Polypeptide
EVQLVESGGGLVQPGGSLKLSCAASGFTFNSYAMNWVRQAPGKGLEWVARIRSKYNNYATYYADSVKGRFTISRDDSKNTAYLQMNNLKTEDTAVYYCVRHGNFGNSYVSWWAYWGQGTLVTVSS

SEQ ID NO: 628 - protein, 125 aa, Artificial Sequence
  Synthetic Polypeptide
EVQLLESGGGLVQPGGSLKLSCAASGFTFNSYAMNWVRQAPGKGLEWVARIRSKYNNYATYYADSVKGRFTISRDDSKNTAYLQMNNLKTEDTAVYYCVRHGNFGNSYVSWWAYWGQGTLVTVSS

SEQ ID NO: 629 - protein, 109 aa, Artificial Sequence
  Synthetic Polypeptide
QTVVTQEPSLTVSPGGTVTLTCGSSTGAVTSGNYPNWVQQKPGQAPRGLIGGTKFLAPGTPARFSGSLLGGKAALTLSGVQPEDEAEYYCVLWYSNRWVFGGGTKLTVL

SEQ ID NO: 630 - protein, 109 aa, Artificial Sequence
  Synthetic Polypeptide
ELVVTQEPSLTVSPGGTVTLTCGSSTGAVTSGNYPNWVQQKPGQAPRGLIGGTKFLAPGTPARFSGSLLGGKAALTLSGVQPEDEAEYYCVLWYSNRWVFGGGTKLTVL

SEQ ID NO: 631 - protein, 249 aa, Artificial Sequence
  Synthetic Polypeptide
EVQLVESGGGLVQPGGSLKLSCAASGFTFNSYAMNWVRQAPGKGLEWVARIRSKYNNYATYYADSVKGRFTISRDDSKNTAYLQMNNLKTEDTAVYYCVRHGNFGNSYVSWWAYWGQGTLVTVSSGGGGSGGGGSGGGGSQTVVTQEPSLTVSPGGTVTLTCGSSTGAVTSGNYPNWVQQKPGQAPRGLIGGTKFLAPGTPARFSGSLLGGKAALTLSGVQPEDEAEYYCVLWYSNRWVFGGGTKLTVL

SEQ ID NO: 632 - protein, 249 aa, Artificial Sequence
  Synthetic Polypeptide
EVQLLESGGGLVQPGGSLKLSCAASGFTFNSYAMNWVRQAPGKGLEWVARIRSKYNNYATYYADSVKGRFTISRDDSKNTAYLQMNNLKTEDTAVYYCVRHGNFGNSYVSWWAYWGQGTLVTVSSGGGGSGGGGSGGGGSELVVTQEPSLTVSPGGTVTLTCGSSTGAVTSGNYPNWVQQKPGQAPRGLIGGTKFLAPGTPARFSGSLLGGKAALTLSGVQPEDEAEYYCVLWYSNRWVFGGGTKLTVL

SEQ ID NO: 633 - protein, 14 aa, Artificial Sequence
  Synthetic Polypeptide
GSSTGAVTSGNYPN

SEQ ID NO: 634 - protein, 7 aa, Artificial Sequence
  Synthetic Polypeptide
GTKFLAP

SEQ ID NO: 635 - protein, 9 aa, Artificial Sequence
  Synthetic Polypeptide
VLWYSNRWV

SEQ ID NO: 636 - protein, 5 aa, Artificial Sequence
  Synthetic Polypeptide
KYAMN

SEQ ID NO: 637 - protein, 19 aa, Artificial Sequence
  Synthetic Polypeptide
RIRSKYNNYATYYADSVKD

SEQ ID NO: 638 - protein, 14 aa, Artificial Sequence
  Synthetic Polypeptide
HGNFGNSYISYWAY

SEQ ID NO: 639 - protein, 125 aa, Artificial Sequence; identical to SEQ ID NO: 548
  Synthetic Polypeptide

SEQ ID NO: 640 - protein, 125 aa, Artificial Sequence; identical to SEQ ID NO: 549
  Synthetic Polypeptide

SEQ ID NO: 641 - protein, 109 aa, Artificial Sequence; identical to SEQ ID NO: 629
  Synthetic Polypeptide

SEQ ID NO: 642 - protein, 249 aa, Artificial Sequence
  Synthetic Polypeptide
EVQLVESGGGLVQPGGSLKLSCAASGFTFNKYAMNWVRQAPGKGLEWVARIRSKYNNYATYYADSVKDRFTISRDDSKNTAYLQMNNLKTEDTAVYYCVRHGNFGNSYISYWAYWGQGTLVTVSSGGGGSGGGGSGGGGSQTVVTQEPSLTVSPGGTVTLTCGSSTGAVTSGNYPNWVQQKPGQAPRGLIGGTKFLAPGTPARFSGSLLGGKAALTLSGVQPEDEAEYYCVLWYSNRWVFGGGTKLTVL

SEQ ID NO: 643 - protein, 249 aa, Artificial Sequence
  Synthetic Polypeptide
EVQLLESGGGLVQPGGSLKLSCAASGFTFNKYAMNWVRQAPGKGLEWVARIRSKYNNYATYYADSVKDRFTISRDDSKNTAYLQMNNLKTEDTAVYYCVRHGNFGNSYISYWAYWGQGTLVTVSSGGGGSGGGGSGGGGSELVVTQEPSLTVSPGGTVTLTCGSSTGAVTSGNYPNWVQQKPGQAPRGLIGGTKFLAPGTPARFSGSLLGGKAALTLSGVQPEDEAEYYCVLWYSNRWVFGGGTKLTVL

SEQ ID NO: 644 - protein, 125 aa, Artificial Sequence
  Synthetic Polypeptide
EVQLVESGGGLVQPGGSLRLSCAASGFTFNSYAMNWVRQAPGKGLEWVARIRSKYNNYATYYADSVKGRFTISRDDSKNTAYLQMNSLKTEDTAVYYCVRHGNFGNSYVSWWAYWGQGTLVTVSS

SEQ ID NO: 645 - protein, 109 aa, Artificial Sequence; identical to SEQ ID NO: 629
  Synthetic Polypeptide

SEQ ID NO: 646 - protein, 249 aa, Artificial Sequence
  Synthetic Polypeptide
EVQLVESGGGLVQPGGSLRLSCAASGFTFNSYAMNWVRQAPGKGLEWVARIRSKYNNYATYYADSVKGRFTISRDDSKNTAYLQMNSLKTEDTAVYYCVRHGNFGNSYVSWWAYWGQGTLVTVSSGGGGSGGGGSGGGGSQTVVTQEPSLTVSPGGTVTLTCGSSTGAVTSGNYPNWVQQKPGQAPRGLIGGTKFLAPGTPARFSGSLLGGKAALTLSGVQPEDEAEYYCVLWYSNRWVFGGGTKLTVL

SEQ ID NO: 647 - protein, 184 aa, Homo Sapiens
MLQMAGQCSQNEYFDSLLHACIPCQLRCSSNTPPLTCQRYCNASVTNSVKGTNAILWTCLGLSLIISLAVFVLMFLLRKINSEPLKDEFKNTGSGLLGMANIDLEKSRTGDEIILPRGLEYTVEECTCEDCIKSKPKVDSDHCFPLPAMEEGATILVTTKTNDYCKSLPAALSATEIEKSISAR

SEQ ID NO: 648 - protein, 183 aa, Rhesus macaque
MLQMARQCSQNEYFDSLLHDCKPCQLRCSSTPPLTCQRYCNASMTNSVKGMNAILWTCLGLSLIISLAVFVLTFLLRKMSSEPLKDEFKNTGSGLLGMANIDLEKGRTGDEIVLPRGLEYTVEECTCEDCIKNKPKVDSDHCFPLPAMEEGATILVTTKTNDYCNSLSAALSVTEIEKSISAR

SEQ ID NO: 649 - protein, 54 aa, Homo Sapien
MLQMAGQCSQNEYFDSLLHACIPCQLRCSSNTPPLTCQRYCNASVTNSVKGTNA

SEQ ID NO: 650 - protein, 53 aa, Rhesus macaque
MLQMARQCSQNEYFDSLLHDCKPCQLRCSSTPPLTCQRYCNASMTNSVKGMNA

SEQ ID NO: 651 - protein, 18 aa, Homo Sapien
CQLRCSSNTPPLTCQRYC

SEQ ID NO: 652 - protein, 17 aa, Rhesus macaque
CQLRCSSTPPLTCQRYC

SEQ ID NO: 653 - protein, 105 aa, Homo Sapien
QDGNEEMGGITQTPYKVSISGTTVILTCPQYPGSEILWQHNDKNIGGDEDDKNIGSDEDHLSLKEFSELEQSGYYVCYPRGSKPEDANFYLYLRARVCENCMEMD

SEQ ID NO: 654 - protein, 27 aa, Homo Sapien
QDGNEEMGGITQTPYKVSISGTTVILT

SEQ ID NO: 655 - protein, 96 aa, Callithrix jacchus
QDGNEEMGDTTQNPYKVSISGTTVTLTCPRYDGHEIKWLVNSQNKEGHEDHLLLEDFSEMEQSGYYACLSKETPAEEASHYLYLKARVCENCVEVD

SEQ ID NO: 656 - protein, 27 aa, Callithrix jacchus
QDGNEEMGDTTQNPYKVSISGTTVTLT

SEQ ID NO: 657 - protein, 96 aa, Saguinus oedipus; identical to SEQ ID NO: 655

SEQ ID NO: 658 - protein, 27 aa, Saguinus oedipus
QDGNEEMGDTTQNPYKVSISGTTVTLT

SEQ ID NO: 659 - protein, 96 aa, Saimiri sciureus
QDGNEEIGDTTQNPYKVSISGTTVTLTCPRYDGQEIKWLVNDQNKEGHEDHLLLEDFSEMEQSGYYACLSKETPTEEASHYLYLKARVCENCVEVD

SEQ ID NO: 660 - protein, 27 aa, Saimiri sciureus
QDGNEEIGDTTQNPYKVSISGTTVTLT

SEQ ID NO: 661 - protein, 986 aa, Artificial Sequence
  Synthetic Polypeptide
QVQLVQSGAEVKKPGASVKVSCKASGYTFTNHIIHWVRQAPGQCLEWMGYINPYPGYHAYNEKFQGRATMTSDTSTSTVYMELSSLRSEDTAVYYCARDGYYRDTDVLDYWGQGTLVTVSSGGGGSGGGGSGGGGSDIQMTQSPSSLSASVGDRVTITCQASQDISNYLNWYQQKPGKAPKLLIYYTSRLHTGVPSRFSGSGSGTDFTFTISSLEPEDIATYYCQQGNTLPWTFGCGTKVEIKSGGGGSEVQLVESGGGLVQPGGSLKLSCAASGFTFNKYAMNWVRQAPGKGLEWVARIRSKYNNYATYYADSVKDRFTISRDDSKNTAYLQMNNLKTEDTAVYYCVRHGNFGNSYISYWAYWGQGTLVTVSSGGGGSGGGGSGGGGSQTVVTQEPSLTVSPGGTVTLTCGSSTGAVTSGNYPNWVQQKPGQAPRGLIGGTKFLAPGTPARFSGSLLGGKAALTLSGVQPEDEAEYYCVLWYSNRWVFGGGTKLTVLGGGGDKTHTCPPCPAPELLGGPSVFLFPPKPKDTLMISRTPEVTCVVVDVSHEDPEVKFNWYVDGVEVHNAKTKPCEEQYGSTYRCVSVLTVLHQDWLNGKEYKCKVSNKALPAPIEKTISKAKGQPREPQVYTLPPSREEMTKNQVSLTCLVKGFYPSDIAVEWESNGQPENNYKTTPPVLDSDGSFFLYSKLTVDKSRWQQGNVFSCSVMHEALHNHYTQKSLSLSPGKGGGGSGGGGSGGGGSGGGGSGGGGSGGGGSDKTHTCPPCPAPELLGGPSVFLFPPKPKDTLMISRTPEVTCVVVDVSHEDPEVKFNWYVDGVEVHNAKTKPCEEQYGSTYRCVSVLTVLHQDWLNGKEYKCKVSNKALPAPIEKTISKAKGQPREPQVYTLPPSREEMTKNQVSLTCLVKGFYPSDIAVEWESNGQPENNYKTTPPVLDSDGSFFLYSKLTVDKSRWQQGNVFSCSVMHEALHNHYTQKSLSLSPGK

SEQ ID NO: 662 - protein, 5 aa, Artificial Sequence
  Synthetic Polypeptide
HHHHH

SEQ ID NO: 663 - protein, 6 aa, Artificial Sequence
  Synthetic Polypeptide
HHHHHH

SEQ ID NO: 664 - protein, 7 aa, Artificial Sequence
  Synthetic Polypeptide
HHHHHHH

SEQ ID NO: 665 - protein, 8 aa, Artificial Sequence
  Synthetic Polypeptide
HHHHHHHH

SEQ ID NO: 666 - protein, 6 aa, Artificial Sequence
  Synthetic Polypeptide
DTYRYI

SEQ ID NO: 667 - protein, 6 aa, Artificial Sequence
  Synthetic Polypeptide
TDFYLK

SEQ ID NO: 668 - protein, 11 aa, Artificial Sequence
  Synthetic Polypeptide
MASMTGGQQMG

SEQ ID NO: 669 - protein, 14 aa, Artificial Sequence
  Synthetic Polypeptide
GKPIPNPLLGLDST

SEQ ID NO: 670 - protein, 6 aa, Artificial Sequence
  Synthetic Polypeptide
QYPALT

SEQ ID NO: 671 - protein, 10 aa, Artificial Sequence
  Synthetic Polypeptide
SSTSSDFRDR

SEQ ID NO: 672 - protein, 7 aa, Artificial Sequence
  Synthetic Polypeptide
DYKDDDK

SEQ ID NO: 673 - protein, 6 aa, Artificial Sequence
  Synthetic Polypeptide
EYMPME

SEQ ID NO: 674 - protein, 6 aa, Artificial Sequence
  Synthetic Polypeptide
EFMPME

SEQ ID NO: 675 - protein, 19 aa, Artificial Sequence
  Synthetic Polypeptide
KDHLIHNVHKEFHAHAHNK

SEQ ID NO: 676 - protein, 8 aa, Artificial Sequence
  Synthetic Polypeptide
QPELAPED

SEQ ID NO: 677 - protein, 11 aa, Artificial Sequence
  Synthetic Polypeptide
KPPTPPPEPET

SEQ ID NO: 678 - protein, 11 aa, Artificial Sequence
  Synthetic Polypeptide
CEQKLISEEDL

SEQ ID NO: 679 - protein, 9 aa, Artificial Sequence
  Synthetic Polypeptide
NANNPDWDF

SEQ ID NO: 680 - protein, 15 aa, Artificial Sequence
  Synthetic Polypeptide
KETAAAKFERQHMDS

SEQ ID NO: 681 - protein, 8 aa, Artificial Sequence
  Synthetic Polypeptide
WSHPQFEK

SEQ ID NO: 682 - protein, 9 aa, Artificial Sequence
  Synthetic Polypeptide
AWAHPQPGG

SEQ ID NO: 683 - protein, 6 aa, Artificial Sequence
  Synthetic Polypeptide
HTTPHH

SEQ ID NO: 684 - protein, 11 aa, Artificial Sequence
  Synthetic Polypeptide
YTDIEMNRLGK

SEQ ID NO: 685 - protein, 12 aa, Artificial Sequence
  Synthetic Polypeptide
EDQVDPRLIDGK

SEQ ID NO: 686 - protein, 4 aa, Artificial Sequence
  Synthetic Polypeptide
GGGG

SEQ ID NO: 687 - protein, 5 aa, Artificial Sequence
  Synthetic Polypeptide
GGGGS

SEQ ID NO: 688 - protein, 5 aa, Artificial Sequence
  Synthetic Polypeptide
GGGGQ

SEQ ID NO: 689 - protein, 6 aa, Artificial Sequence
  Synthetic Polypeptide
SGGGGS

SEQ ID NO: 690 - protein, 6 aa, Artificial Sequence
  Synthetic Polypeptide
PGGGGS

SEQ ID NO: 691 - protein, 6 aa, Artificial Sequence
  Synthetic Polypeptide
PGGDGS

SEQ ID NO: 692 - protein, 9 aa, Artificial Sequence
  Synthetic Polypeptide
GGGGSGGGS

SEQ ID NO: 693 - protein, 10 aa, Artificial Sequence
  Synthetic Polypeptide
GGGGSGGGGS

SEQ ID NO: 694 - protein, 15 aa, Artificial Sequence
  Synthetic Polypeptide
GGGGSGGGGSGGGGS

SEQ ID NO: 695 - protein, 20 aa, Artificial Sequence
  Synthetic Polypeptide
GGGGSGGGGSGGGGSGGGGS

SEQ ID NO: 696 - protein, 25 aa, Artificial Sequence
  Synthetic Polypeptide
GGGGSGGGGSGGGGSGGGGSGGGGS

SEQ ID NO: 697 - protein, 30 aa, Artificial Sequence
  Synthetic Polypeptide
GGGGSGGGGSGGGGSGGGGSGGGGSGGGGS

SEQ ID NO: 698 - protein, 35 aa, Artificial Sequence
  Synthetic Polypeptide
GGGGSGGGGSGGGGSGGGGSGGGGSGGGGSGGGGS

SEQ ID NO: 699 - protein, 40 aa, Artificial Sequence
  Synthetic Polypeptide
GGGGSGGGGSGGGGSGGGGSGGGGSGGGGSGGGGSGGGGS

SEQ ID NO: 700 - protein, 484 aa, Artificial Sequence
  Synthetic Polypeptide
DKTHTCPPCPAPELLGGPSVFLFPPKPKDTLMISRTPEVTCVVVDVSHEDPEVKFNWYVDGVEVHNAKTKPCEEQYGSTYRCVSVLTVLHQDWLNGKEYKCKVSNKALPAPIEKTISKAKGQPREPQVYTLPPSREEMTKNQVSLTCLVKGFYPSDIAVEWESNGQPENNYKTTPPVLDSDGSFFLYSKLTVDKSRWQQGNVFSCSVMHEALHNHYTQKSLSLSPGKGGGGSGGGGSGGGGSGGGGSGGGGSGGGGSDKTHTCPPCPAPELLGGPSVFLFPPKPKDTLMISRTPEVTCVVVDVSHEDPEVKFNWYVDGVEVHNAKTKPCEEQYGSTYRCVSVLTVLHQDWLNGKEYKCKVSNKALPAPIEKTISKAKGQPREPQVYTLPPSREEMTKNQVSLTCLVKGFYPSDIAVEWESNGQPENNYKTTPPVLDSDGSFFLYSKLTVDKSRWQQGNVFSCSVMHEALHNHYTQKSLSLSPGK

SEQ ID NO: 701 - protein, 480 aa, Artificial Sequence
  Synthetic Polypeptide
DKTHTCPPCPAPELLGGPSVFLFPPKPKDTLMISRTPEVTCVVVDVSHEDPEVKFNWYVDGVEVHNAKTKPCEEQYGSTYRCVSVLTVLHQDWLNGKEYKCKVSNKALPAPIEKTISKAKGQPREPQVYTLPPSREEMTKNQVSLTCLVKGFYPSDIAVEWESNGQPENNYKTTPPVLDSDGSFFLYSKLTVDKSRWQQGNVFSCSVMHEALHNHYTQKSLSLSPGGGGSGGGGSGGGGSGGGGSGGGGSGGGGSDKTHTCPPCPAPELLGGPSVFLFPPKPKDTLMISRTPEVTCVVVDVSHEDPEVKFNWYVDGVEVHNAKTKPCEEQYGSTYRCVSVLTVLHQDWLNGKEYKCKVSNKALPAPIEKTISKAKGQPREPQVYTLPPSREEMTKNQVSLTCLVKGFYPSDIAVEWESNGQPENNYKTTPPVLDSDGSFFLYSKLTVDKSRWQQGNVFSCSVMHEALHNHYTQKSLSLSP

SEQ ID NO: 702 - protein, 484 aa, Artificial Sequence
  Synthetic Polypeptide
DKTHTCPPCPAPELLGGPSVFLFPPKPKDTLMISRTPEVTCVVVDVSHEDPEVKFNWYVDGVEVHNAKTKPREEQYNSTYRVVSVLTVLHQDWLNGKEYKCKVSNKALPAPIEKTISKAKGQPREPQVYTLPPSREEMTKNQVSLTCLVKGFYPSDIAVEWESNGQPENNYKTTPPVLDSDGSFFLYSKLTVDKSRWQQGNVFSCSVMHEALHNHYTQKSLSLSPGKGGGGSGGGGSGGGGSGGGGSGGGGSGGGGSDKTHTCPPCPAPELLGGPSVFLFPPKPKDTLMISRTPEVTCVVVDVSHEDPEVKFNWYVDGVEVHNAKTKPREEQYNSTYRVVSVLTVLHQDWLNGKEYKCKVSNKALPAPIEKTISKAKGQPREPQVYTLPPSREEMTKNQVSLTCLVKGFYPSDIAVEWESNGQPENNYKTTPPVLDSDGSFFLYSKLTVDKSRWQQGNVFSCSVMHEALHNHYTQKSLSLSPGK

SEQ ID NO: 703 - protein, 480 aa, Artificial Sequence
  Synthetic Polypeptide
DKTHTCPPCPAPELLGGPSVFLFPPKPKDTLMISRTPEVTCVVVDVSHEDPEVKFNWYVDGVEVHNAKTKPREEQYNSTYRVVSVLTVLHQDWLNGKEYKCKVSNKALPAPIEKTISKAKGQPREPQVYTLPPSREEMTKNQVSLTCLVKGFYPSDIAVEWESNGQPENNYKTTPPVLDSDGSFFLYSKLTVDKSRWQQGNVFSCSVMHEALHNHYTQKSLSLSPGGGGSGGGGSGGGGSGGGGSGGGGSGGGGSDKTHTCPPCPAPELLGGPSVFLFPPKPKDTLMISRTPEVTCVVVDVSHEDPEVKFNWYVDGVEVHNAKTKPREEQYNSTYRVVSVLTVLHQDWLNGKEYKCKVSNKALPAPIEKTISKAKGQPREPQVYTLPPSREEMTKNQVSLTCLVKGFYPSDIAVEWESNGQPENNYKTTPPVLDSDGSFFLYSKLTVDKSRWQQGNVFSCSVMHEALHNHYTQKSLSLSP

SEQ ID NO: 704 - protein, 484 aa, Artificial Sequence
  Synthetic Polypeptide
DKTHTCPPCPAPELLGGPSVFLFPPKPKDTLMISRTPEVTCVVVDVSHEDPEVKFNWYVDGVEVHNAKTKPREEQYGSTYRVVSVLTVLHQDWLNGKEYKCKVSNKALPAPIEKTISKAKGQPREPQVYTLPPSREEMTKNQVSLTCLVKGFYPSDIAVEWESNGQPENNYKTTPPVLDSDGSFFLYSKLTVDKSRWQQGNVFSCSVMHEALHNHYTQKSLSLSPGKGGGGSGGGGSGGGGSGGGGSGGGGSGGGGSDKTHTCPPCPAPELLGGPSVFLFPPKPKDTLMISRTPEVTCVVVDVSHEDPEVKFNWYVDGVEVHNAKTKPREEQYGSTYRVVSVLTVLHQDWLNGKEYKCKVSNKALPAPIEKTISKAKGQPREPQVYTLPPSREEMTKNQVSLTCLVKGFYPSDIAVEWESNGQPENNYKTTPPVLDSDGSFFLYSKLTVDKSRWQQGNVFSCSVMHEALHNHYTQKSLSLSPGK

SEQ ID NO: 705 - protein, 480 aa, Artificial Sequence
  Synthetic Polypeptide
DKTHTCPPCPAPELLGGPSVFLFPPKPKDTLMISRTPEVTCVVVDVSHEDPEVKFNWYVDGVEVHNAKTKPREEQYGSTYRVVSVLTVLHQDWLNGKEYKCKVSNKALPAPIEKTISKAKGQPREPQVYTLPPSREEMTKNQVSLTCLVKGFYPSDIAVEWESNGQPENNYKTTPPVLDSDGSFFLYSKLTVDKSRWQQGNVFSCSVMHEALHNHYTQKSLSLSPGGGGSGGGGSGGGGSGGGGSGGGGSGGGGSDKTHTCPPCPAPELLGGPSVFLFPPKPKDTLMISRTPEVTCVVVDVSHEDPEVKFNWYVDGVEVHNAKTKPREEQYGSTYRVVSVLTVLHQDWLNGKEYKCKVSNKALPAPIEKTISKAKGQPREPQVYTLPPSREEMTKNQVSLTCLVKGFYPSDIAVEWESNGQPENNYKTTPPVLDSDGSFFLYSKLTVDKSRWQQGNVFSCSVMHEALHNHYTQKSLSLSP

SEQ ID NO: 706 - protein, 484 aa, Artificial Sequence
  Synthetic Polypeptide
DKTHTCPPCPAPELLGGPSVFLFPPKPKDTLMISRTPEVTCVVVDVSHEDPEVKFNWYVDGVEVHNAKTKPCEEQYNSTYRCVSVLTVLHQDWLNGKEYKCKVSNKALPAPIEKTISKAKGQPREPQVYTLPPSREEMTKNQVSLTCLVKGFYPSDIAVEWESNGQPENNYKTTPPVLDSDGSFFLYSKLTVDKSRWQQGNVFSCSVMHEALHNHYTQKSLSLSPGKGGGGSGGGGSGGGGSGGGGSGGGGSGGGGSDKTHTCPPCPAPELLGGPSVFLFPPKPKDTLMISRTPEVTCVVVDVSHEDPEVKFNWYVDGVEVHNAKTKPCEEQYNSTYRCVSVLTVLHQDWLNGKEYKCKVSNKALPAPIEKTISKAKGQPREPQVYTLPPSREEMTKNQVSLTCLVKGFYPSDIAVEWESNGQPENNYKTTPPVLDSDGSFFLYSKLTVDKSRWQQGNVFSCSVMHEALHNHYTQKSLSLSPGK

SEQ ID NO: 707 - protein, 480 aa, Artificial Sequence
  Synthetic Polypeptide
DKTHTCPPCPAPELLGGPSVFLFPPKPKDTLMISRTPEVTCVVVDVSHEDPEVKFNWYVDGVEVHNAKTKPCEEQYNSTYRCVSVLTVLHQDWLNGKEYKCKVSNKALPAPIEKTISKAKGQPREPQVYTLPPSREEMTKNQVSLTCLVKGFYPSDIAVEWESNGQPENNYKTTPPVLDSDGSFFLYSKLTVDKSRWQQGNVFSCSVMHEALHNHYTQKSLSLSPGGGGSGGGGSGGGGSGGGGSGGGGSGGGGSDKTHTCPPCPAPELLGGPSVFLFPPKPKDTLMISRTPEVTCVVVDVSHEDPEVKFNWYVDGVEVHNAKTKPCEEQYNSTYRCVSVLTVLHQDWLNGKEYKCKVSNKALPAPIEKTISKAKGQPREPQVYTLPPSREEMTKNQVSLTCLVKGFYPSDIAVEWESNGQPENNYKTTPPVLDSDGSFFLYSKLTVDKSRWQQGNVFSCSVMHEALHNHYTQKSLSLSP

SEQ ID NO: 708 - protein, 227 aa, Artificial Sequence
  Synthetic Polypeptide
DKTHTCPPCPAPELLGGPSVFLFPPKPKDTLMISRTPEVTCVVVDVSHEDPEVKFNWYVDGVEVHNAKTKPCEEQYGSTYRCVSVLTVLHQDWLNGKEYKCKVSNKALPAPIEKTISKAKGQPREPQVYTLPPSREEMTKNQVSLTCLVKGFYPSDIAVEWESNGQPENNYKTTPPVLDSDGSFFLYSKLTVDKSRWQQGNVFSCSVMHEALHNHYTQKSLSLSPGK

SEQ ID NO: 709 - protein, 225 aa, Artificial Sequence
  Synthetic Polypeptide
DKTHTCPPCPAPELLGGPSVFLFPPKPKDTLMISRTPEVTCVVVDVSHEDPEVKFNWYVDGVEVHNAKTKPCEEQYGSTYRCVSVLTVLHQDWLNGKEYKCKVSNKALPAPIEKTISKAKGQPREPQVYTLPPSREEMTKNQVSLTCLVKGFYPSDIAVEWESNGQPENNYKTTPPVLDSDGSFFLYSKLTVDKSRWQQGNVFSCSVMHEALHNHYTQKSLSLSP

SEQ ID NO: 710 - protein, 227 aa, Artificial Sequence
  Synthetic Polypeptide
DKTHTCPPCPAPELLGGPSVFLFPPKPKDTLMISRTPEVTCVVVDVSHEDPEVKFNWYVDGVEVHNAKTKPREEQYNSTYRVVSVLTVLHQDWLNGKEYKCKVSNKALPAPIEKTISKAKGQPREPQVYTLPPSREEMTKNQVSLTCLVKGFYPSDIAVEWESNGQPENNYKTTPPVLDSDGSFFLYSKLTVDKSRWQQGNVFSCSVMHEALHNHYTQKSLSLSPGK

SEQ ID NO: 711 - protein, 225 aa, Artificial Sequence
  Synthetic Polypeptide
DKTHTCPPCPAPELLGGPSVFLFPPKPKDTLMISRTPEVTCVVVDVSHEDPEVKFNWYVDGVEVHNAKTKPREEQYNSTYRVVSVLTVLHQDWLNGKEYKCKVSNKALPAPIEKTISKAKGQPREPQVYTLPPSREEMTKNQVSLTCLVKGFYPSDIAVEWESNGQPENNYKTTPPVLDSDGSFFLYSKLTVDKSRWQQGNVFSCSVMHEALHNHYTQKSLSLSP

SEQ ID NO: 712 - protein, 227 aa, Artificial Sequence
  Synthetic Polypeptide
DKTHTCPPCPAPELLGGPSVFLFPPKPKDTLMISRTPEVTCVVVDVSHEDPEVKFNWYVDGVEVHNAKTKPREEQYGSTYRVVSVLTVLHQDWLNGKEYKCKVSNKALPAPIEKTISKAKGQPREPQVYTLPPSREEMTKNQVSLTCLVKGFYPSDIAVEWESNGQPENNYKTTPPVLDSDGSFFLYSKLTVDKSRWQQGNVFSCSVMHEALHNHYTQKSLSLSPGK

SEQ ID NO: 713 - protein, 225 aa, Artificial Sequence
  Synthetic Polypeptide
DKTHTCPPCPAPELLGGPSVFLFPPKPKDTLMISRTPEVTCVVVDVSHEDPEVKFNWYVDGVEVHNAKTKPREEQYGSTYRVVSVLTVLHQDWLNGKEYKCKVSNKALPAPIEKTISKAKGQPREPQVYTLPPSREEMTKNQVSLTCLVKGFYPSDIAVEWESNGQPENNYKTTPPVLDSDGSFFLYSKLTVDKSRWQQGNVFSCSVMHEALHNHYTQKSLSLSP

SEQ ID NO: 714 - protein, 227 aa, Artificial Sequence
  Synthetic Polypeptide
DKTHTCPPCPAPELLGGPSVFLFPPKPKDTLMISRTPEVTCVVVDVSHEDPEVKFNWYVDGVEVHNAKTKPCEEQYNSTYRCVSVLTVLHQDWLNGKEYKCKVSNKALPAPIEKTISKAKGQPREPQVYTLPPSREEMTKNQVSLTCLVKGFYPSDIAVEWESNGQPENNYKTTPPVLDSDGSFFLYSKLTVDKSRWQQGNVFSCSVMHEALHNHYTQKSLSLSPGK

SEQ ID NO: 715 - protein, 225 aa, Artificial Sequence
  Synthetic Polypeptide
DKTHTCPPCPAPELLGGPSVFLFPPKPKDTLMISRTPEVTCVVVDVSHEDPEVKFNWYVDGVEVHNAKTKPCEEQYNSTYRCVSVLTVLHQDWLNGKEYKCKVSNKALPAPIEKTISKAKGQPREPQVYTLPPSREEMTKNQVSLTCLVKGFYPSDIAVEWESNGQPENNYKTTPPVLDSDGSFFLYSKLTVDKSRWQQGNVFSCSVMHEALHNHYTQKSLSLSP
